United States Patent Application Publication US 2019/0002960 A1 - sequence listing, part 10

SEQ ID NO: 10 - DNA, 2864125 bp, Staphylococcus aureus M1 (residues 1-1,432,063 of 2,864,125)
  misc_feature (508573)..(513989): n is a, c, g, or t
  misc_feature (552858)..(557968): n is a, c, g, or t
  misc_feature (1988135)..(1993109): n is a, c, g, or t
  misc_feature (2284554)..(2289626): n is a, c, g, or t
gaacttaaaacctatataattatatataaacgactggaaggagttttaattaatgatggaattcactattaaaagagattattttattacacaattaaatgacacattaaaagctatttcaccaagaacaacattacctatattaactggtatcaaaatcgatgcgaaagaacatgaagttatattaactggttcagactctgaaatttcaatagaaatcactattcctaaaactgtagatggcgaagatattgtcaatatttcagaaacaggctcagtagtacttcctggacgattctttgttgatattataaaaaaattacctggtaaagatgttaaattatctacaaatgaacaattccagacattaattacatcaggtcattctgaatttaatttaagtggcttagatccagatcaatatcctttattacctcaagtttctagagatgacgcaattcaattgtcggtaaaagtgcttaaaaacgtgattgcacaaacaaattttgcagtgtccacctcagaaacacgcccagtactaactggtgtgaactggcttatacaagaaaatgaattaatatgcacagcgactgactcacaccgcttggctgtaagaaagttgcagttagaagatgtttctgaaaacaaaaatgtcatcattccaggtaaggctttagctgaattaaataaaattatgtctgacaatgaagaagacattgatatcttctttgcttcaaaccaagttttatttaaagttggaaatgtgaactttatttctcgattattagaaggacattatcctgatacaacacgtttattccctgaaaactatgaaattaaattaagtatagacaatggggagttttatcatgcgattgatcgtgcctctttattagcgcgtgaaggtggtaataacgttattaaattaagtacaggtgatgacgttgttgaattgtcttctacatcaccagaaattggtactgtaaaagaagaagttgatgcaaacgatgttgaaggtggtagcctgaaaatttcattcaactctaaatatatgatggatgctttaaaagcaatcgataatgatgaggttgaagttgaattcttcggtacaatgaaaccatttattctaaaaccaaaaggtgacgactcggtaacgcaattaattttaccaatcagaacttactaaaaataaatataaataaaggatgacgtgattaattaaaacgtcatcctttattttttggcaaaaataattctaggtgcgtatgtaaaataaatttggcagcattttaaacagcaaataaaagacgccaattaaatttatgacaaatgtatccaaaatttaataagtgtgcttatatgccctttaaatttaaaattttaatagtcaataacaagttgaatataaaagttaaacgccgttaaatagcgttaaaaaattgaaaatgacagtattgccaaaaaataagaattaattatttatatgtaaacggtttctacctctattttaaatgaaatttgtgacaaaaaaaggtataatatattaatgacatacaaagaaatggagtgattattttggttcaagaagttgtagtagaaggagacattaatttaggtcaatttctaaaaacagaagggattattgaatctggtggtcaagcaaaatggttcttgcaagacgttgaagtattaattaatggagtgcgtgaaacacgtcgcggtaaaaagttagaacatcaagatcgtatagatatcccagaattacctgaagatgctggttctttcttaatcattcatcaaggtgaacaatgaagttaaatacactccaattagaaaattatcgtaactatgatgaggttacgttgaaatgtcatcctgacgtgaatatcctcattggagaaaatgcacaaggaaagacaaatttacttgaatcaatttataccttagctttagcaaaaagtcatagaacgagtaatgataaggaactcatacgttttaatgctgattatgctaaaatagaaggtgagcttagttatagacacggcacgatgccattaacaatgtttataactaaaaaaggtaaacaagtcaaagtgaatcacttagagcaaagtcgtctaactcaatatattggacacctcaatgtggttctatttgcgccagaagatttgaatattgtaaaaggctctcctcaaataagacgacgctttatagatatggagttgggccaaatttctgctgtttacttaaatgatttagctcaataccaacgtattttaaagcaaaagaataattacttaaagcagttacaattaggccaaaaaaaggacttaacaatgttggaagtattaaatcagcagtttgctgaatatgcaatgaaagtaactgataaacgtgcacattttattcaagagctagagtcgttagctaaaccgattcatgctggtatcacaaatgataaagaagcgttgtcgctgaattatttacctagtcttaaatttgattatgctcaaaatgaagcggcacgacttgaagaaattatgtctattcttagcgataatatgcaaagagaaaaagaacgaggcattagcttattcggaccacatcgagatgatataagttttgatgtgaatggcatggatgctcaaacatatggttctcaaggacagcaacgtacaacggctttgtccattaaattagctgaaattgagttaatgaatatcgaagttggggaatatcccatcttattattagacgatgtactcagtgaattagatgattcgcgtcaaacgcatttattaagtacgattcagcataaagtacaaacatttgtcactacgacatctgtagatggtattgatcatgaaatcatgaataacgctaaattgtatcgtattaatcaaggtgaaattataaagtaacagaaagcgatggtgactgcattgtcagatgtaaacaacacggataattatggtgctgggcaaatacaagtattagaaggtttagaagcagtacgtaaaagaccaggtatgtatataggatcgacttcagagagaggtttgcaccatttagtgtgggaaattgtcgataatagtatcgatgaagcattagctggttatgcaaatcaaattgaagttgttattgaaaaagataactggattaaagtaacggataacggacgtggtatcccagttgatattcaagaaaaaatgggacgtccagctgtcgaagttattttaactgttttacatgctggtggtaaatttggcggtggcggatacaaagtatctggtggtttacatggtgttggttcatcagttgtaaacgcattgtcacaagacttagaagtatatgtacacagaaatgagactatatatcatcaagcatataaaaaaggtgtacctcaatttgacttaaaagaagttggcacaactgataagacaggtactgtcattcgttttaaagcagatggagaaatcttcacagagacaactgtatacaactatgaaacattacagcagcgtattagagagcttgctttcttaaacaaaggaattcaaatcacattaagagatgaacgtgatgaagaaaacgttagagaagactcctatcactatgagggcggtattaaatcgtacgttgagttattgaacgaaaataaagaacctattcatgatgagccaatttatattcatcaatctaaagatgatattgaagtagaaattgcgattcaatataactcaggatatgccacaaatcttttaacttacgcaaataacattcatacgtatgaaggtggtacgcatgaagacggattcaaacgtgcattaacgcgtgtcttaaatagttatggtttaagtagcaagattatgaaagaagaaaaagatagactttctggtgaagatacacgtgaaggtatgacagcaattatatctatcaaacatggtgatcctcaattcgaaggtcaaacgaagacaaaattaggtaattctgaagtgcgtcaagttgtagataaattattctcagagcactttgaacgatttttatatgaaaatccacaagtcgcacgtacagtggttgaaaaaggtattatggcggcacgtgcacgtgttgctgcgaaaaaagcgcgtgaagtaacacgtcgtaaatcagcgttagatgtagcaagccttccaggtaaattagccgattgctctagtaaaagtcctgaagaatgtgagattttcttagtcgaaggggactctgccggggggtctacaaaatctggtcgtgactctagaacgcaggcgattttaccattacgaggtaagatattaaatgttgaaaaagcacgattagatagaattttgaataacaatgaaattcgtcaaatgatcacagcatttggtacaggaatcggtggcgactttgatctagcgaaagcaagatatcacaaaatcgtcattatgactgatgccgatgtggatggagcgcatattagaacattgttattaacattcttctatcgatttatgagaccgttaattgaagcaggctatgtgtatattgcacagccaccgttgtataaactgacacaaggtaaacaaaagtattatgtatacaatgatagggaacttgataaacttaaatctgaattgaatccaacaccaaaatggtctattgcacgatacaaaggtcttggagaaatgaatgcagatcaattatgggaaacaacaatgaaccctgagcaccgcgctcttttacaagtaaaacttgaagatgcgattgaagcggaccaaacatttgaaatgttaatgggtgacgttgtagaaaaccgtagacaatttatagaagataatgcagtttatgcaaacttagacttctaagcgctgtgaactgaacttttgaaggaggaactcttgatggctgaattacctcaatcaagaataaatgaacgaaatattaccagtgaaatgcgtgaatcatttttagattatgcgatgagtgttatcgttgctcgtgcattgccagatgttcgtgacggtttaaaaccagtacatcgtcgtatactatatggattaaatgaacaaggtatgacaccggataaatcatataaaaaatcagcacgtatcgttggtgacgtaatgggtaaatatcaccctcatggtgacttatctatttatgaagcaatggtacgtatggctcaagatttcagttatcgttatccgcttgttgatggccaaggtaactttggttcaatggatggagatggcgcagcagcaatgcgttatactgaagcgcgtatgactaaaatcacacttgaactgttacgtgatattaataaagatacaatagattttatcgataactatgatggtaatgaaagagagccgtcagtcttacctgctcgattccctaacttattagccaatggtgcatcaggtatcgcggtaggtatggcaacgaatattccaccacataacttaacagaattaatcaatggtgtacttagcttaagtaagaaccctgatatttcaattgctgagttaatggaggatattgaaggtcctgatttcccaactgctggacttattttaggtaagagtggtattagacgtgcatatgaaacaggtcgtggttcaattcaaatgcgttctcgtgcagttattgaagaacgtggaggcggacgtcaacgtattgttgtcactgaaattcctttccaagtgaataaggctcgtatgattgaaaaaattgcagagctcgttcgtgacaagaaaattgacggtatcactgatttacgtgatgaaacaagtttacgtactggtgtgcgtgtcgttattgatgtgcgtaaggatgcaaatgctagtgtcattttaaataacttatacaaacaaacacctcttcaaacatcatttggtgtgaatatgattgcacttgtaaatggtagaccgaagcttattaatttaaaagaagcgttggtacattatttagagcatcaaaagacagttgttagaagacgtacgcaatacaacttacgtaaagctaaagatcgtgcccacattttagaaggattacgtatcgcacttgaccatatcgatgaaattatttcaacgattcgtgagtcagatacagataaagttgcaatggaaagcttgcaacaacgcttcaaactttctgaaaaacaagctcaagctattttagacatgcgtttaagacgtctaacaggtttagagagagacaaaattgaagctgaatataatgagttattaaattatattagtgaattagaagcaatcttagctgatgaagaagtgttattacagttagttagagatgaattgactgaaattagagatcgtttcggtgatgatcgtcgtacagaaattcaattaggtggatttgaaaacttagaggacgaagacttaattccagaagaacaaatagtaattacactaagccataataactacattaaacgtttgccggtatctacatatcgtgctcaaaaccgtggtggtcgtggtgttcaaggtatgaatacattggaagaagattttgtcagtcaattggtaactttaagtacacatgaccatgtattgttctttactaacaaaggtcgtgtatacaaacttaaaggttacgaagtgcctgagttatcaagacagtctaaaggtattcctgtagtgaatgctattgaacttgaaaatgatgaagtcattagtacaatgattgctgttaaagaccttgaaagtgaagacaacttcttagtgtttgcaactaaacgtggtgtcgttaaacgttcagcattaagtaacttctcaagaataaatagaaatggtaagattgcgatttcgttcagagaagatgatgagttaattgcagttcgcttaacaagtggtcaagaagatatcttgattggtacatcacatgcatcattaattcgattccctgaatcaacattacgtcctttaggccgtacagcaacgggtgtgaaaggtattacacttcgtgaaggtgacgaagttgtagggcttgatgtagctcatgcaaacagtgttgatgaagtattagtagttactgaaaatggttatggtaaacgtacgccagttaatgactatcgcttatcaaatcgtggtggtaaaggtattaaaacagctacgattactgagcgtaatggtaatgttgtatgtatcactacagtaactggtgaagaagatttaatgattgttactaatgcaggtgtcattattcgactagatgttgcagatatttctcaaaatggtcgtgcagcacaaggtgttcgcttaattcgcttaggtgatgatcaatttgtttcaacggttgctaaagtaaaagaagatgcagaagatgaaacgaatgaagatgagcaatctacttcaactgtatctgaagatggtactgaacaacaacgtgaagcggttgtaaatgatgaaacaccaggaaatgcaattcatactgaagtgattgattcagaagaaaatgatgaagatggacgtattgaagtaagacaagatttcatggatcgtgttgaagaagatatacaacaatcatcagatgaagaataataaaaaataagacttccctatatgtaggggagtcttatttttatgctagaaagtaatgctttactatattcaatgattagtaatgactaactttctaattgtttcattgcgtaaggtatttcattgataagtcttgatggtggcaccacatacatatcttttgcaaggttttcgccaataaaactatgtgtatatgtggcactcataaccgcttcttttaagttatcaaattgaccgacaaagcttgtaatcataccagcaagtgtatcgcccataccaccagtcgccattgctgggctaccgattgtcaatttaaagtcttcatctttaaagaaaatttcagtaccatgttttttaagtacaacagttgcacctaaacgatcaactgcttcacgattacgctcatatgtctgttcctcaataggaataccacttaatcgttcccattctttgaggtgtggtgtaaagatcacacgacatgtaggtaattgcggtttcagtttactaaagattgtaatcgcatcgccgtctacgattaaattttgatgcggttgtatattttgtagtaggaatgtaatggcattatttcctttgaaatcaacgccaagacctggaccaattagtatactgtcagtcatttcaatcattttcgtcaacattttcgtatcattaatatcaataaccatcgcttctgggcaacgagaatgtaatgctgaatgatttgttggatgtgtagctacagtgattaaaccactaccgctaaatacacatgcacgagccgctaacataatggcaccacctaagttagcagatccaccaattaataaaattttgccataatcacctttatgtgaatcttctttacgcttaggaatgttaatagaatttaacgtttccatagtgatataacctcccatgtaaaagccttttccgaatttattcaattttaaaaatatatagtaacttttaacaaaatgtattataaatttctgaattcattattatttgtcgttaaatacaatagaaaatactatacctgtatatgcaattcgtcaatagataaattattaaatatgcttacaacaatcttaatatcctttaacgcactacaatagtgctctgataataggttataaatgtacgtaaaaccattgtttcaataaaaatgaaaacgtatacttcaagaaggatgggttacttaatataaacaagggggtaacatatatgactttatatttagatggtgaaacactaacaattgaggatattaaatcatttttacaacaacaatcaaagattgaaattattgatgatgcgttagaacgtgtcaaaaaaagtagagcggtagttgaacgtattattgaaaatgaggaaacggtttacggtattactacaggttttgggttatttagtgatgtacgtatagacccgacgcaatataatgaattacaagtgaatctgatacgctcacatgcctgtggactaggtgagccattttcaaaagaagtagcattagtcatgatgattttacgattgaatacattattaaaaggtcattcaggtgccactttagaattagtgagacaattacaattttttataaatgaacgtattataccgataatcccacagcaaggctctctcggtgcatcaggagatttagcgccattatcacatttagcattagcattaattggtgaagggaaagtattgtacagaggggaagaaaaggatagtgacgatgtattaagagaattaaatagacaacctttgaaccttcaggctaaagaaggtttagcattgattaatggtacgcaagctatgacagctcaaggtgtcattagttatatagaagcagaagatttaggttaccaatctgaatggattgctgcattaacgcatcagtctcttaatggcattatagatgcatatcgacatgatgtgcacgcagttcgtaattttcaagaacagattaatgtggcagcgcgtatgcgtgattggttagaaggatcaacattaacgacgcgacaatcagaaatacgtgtacaagatgcatatacgttgcgttgtataccacaaatccatggcgcgagttttcaagtattcaattatgttaaacagcaattagaatttgaaatgaatgcggctaatgataatccacttatatttgaggaagcaaatgaaacgtttgttatttcaggtggtaacttccatggacaacctattgcttttgcattagatcatcttaaattaggtgtaagtgaattagcaaacgtatcggaacgtcgtctagagcgactagtaaatcctcaattaaatggtgatttaccagcatttcttagtccagagccaggattgcaaagtggcgcgatgattatgcaatatgctgctgcaagtctcgtttctgaaaataaaactttagcgcatccagcgagtgttgattctatcacttcatctgcgaaccaagaagatcacgtatctatgggaactacagctgctagacatggttatcaaattattgaaaatgcaagacgtgtgctggcaatcgaatgtgttattgcattacaagcagcagagttaaaaggtgttgaaggattatcaccaaaaacacgtcgcaagtatgatgagtttcgaagtatcgtgccatccattacacatgatcgtcaatttcataaagatattgaagcggttgcacagtatttaaagcaatcaatttatcaaacgactgcatgtcactaaatcgacatgagtgatgtttgaaatcgttacttgaaaaagcaaatatagtttgctatattaaaaataacttaataagacattgttcgtaggacaagtaatatatagtgttcgatatcagagagcttgtggttagtgtgaacaagaatcaacatatatatgaatctacctacttaatttaaaagaacaatcggtgataaccgttattttagtgaagtgcaatttaggtttagtgtatctttataacttaaattgttaaatagggtggcaacgcgtagaccacgtcccttgtagggatgtggtctttttttattttctaaaaaataaagacgtacgtcattccataataaatgataattatttgggaaaggatgaaggttaatgttagacattagattattcagaaatgagcctgacacagttaagagcaaaattgaattacgtggagatgatccaaaagttgtagatgaaattttagaattggatgagcaacgacgtaaattaattagtgcaacagaagaaatgaaagcacgtcgtaataaagtaagcgaagaaatcgcattaaaaaaacgtaataaagaaaatgctgatgatgtgattgctgaaatgcgcacattaggtgacgatattaaagaaaaagatagtcaattaaatgaaattgataataaaatgacaggtatcctttgtcgtattccaaatttaataagtgatgatgtacctcaaggtgaatctgatgaagataacgttgaagttaaaaagtggggtacaccacgtgagttttcatttgaacccaaagcacattgggatattgtagaagaattgaaaatggctgattttgatcgtgcagcaaaagtttcaggtgcgcgttttgtatatttaacaaatgaaggtgcgcaattagagcgtgctttaatgaactatatgattacaaaacatacaacacaacatggttatacagaaatgatggtaccacagcttgtgaacgcagatacaatgtatggtacaggtcaattacctaaatttgaagaagatttatttaaagtagaaaaagaaggattatatacaattccaactgctgaagtaccattaacgaatttctaccgtaatgaaattattcaaccaggtgtacttcctgaaaaattcactggtcaatctgcatgtttccgtagtgaagcaggatcagcaggtagagatacaagaggattaattcgtttacatcaattcgataaagtggaaatggtacgttttgaacaacctgaagattcatggaatgctttagaagaaatgacaacaaacgcagaagcaattctagaagagttaggtttaccataccgtcgtgttattttatgtacaggtgatattggatttagtgcaagcaaaacatatgatttagaagtttggttaccaagctacaatgattataaagaaattagttcatgctcaaactgtacggatttccaagcgcgtcgtgctaacatccgcttcaagcgtgacaaagcagctaaaccagaattagcacatacattaaatggtagtggtttagcagttggacgtacatttgctgctattgttgaaaattaccaaaatgaagatggaacagtaacaattccagaagcattagtaccatttatgggtggtaaaacacaaatttcaaaaccagttaaataaaggctttagctacaagctttaaaaagtatatatctacgtatacttaaagcaagggcaagatactttaaataatattttaaaaagtggtgacgaagctgtcgccactttttttgtgctgtaaaagtataatagtgagccaatgcacataacaacaataaattaagtttgtggtttaatggggtgaacgcatttcattatagcaacaatacgggataattatgatgaactaaaacaatctaaaacgtaacaagtttgagcatcactaatataggaaaggaagcgataaaatactgatttcgttgatatgtagtatgagttatatcgatggagtagggtagggggaggggatgattataagggagtggtacatgaatcaatatcccagactcatcatcagatataaaaatttataaaattgatacttaaaaacaactacaaatccatagaaaatatggaggtagtcttaaataaaaaattgaaaattctcaaaaataaaaagttaatatgaagctgactaaagactccggtatgtctaacctcagacaaactgatgtctaatgttattgcttagggtatagaactgtattagactaggtatattattttttcgtaattatataaatataaagtggcaaaggaggtaattgagatgacaacacatttaagttttagacaaggcgtgcaagagtgtatcccaacattattgggttatgccggtgttggtatttcatttggtattgtggcttcgtctcaaaactttagtattttagaaattgtcttgttatgtcttgttatatatgccggtgctgcgcaatttattatgtgcgcgttgtttatagcaggtacacctatatcagcgattgtactaactgtatttatcgtaaattcaagaatgttccttttaagtatgtcgcttgcaccaaacttcaagacatatgggttttggaaccgtgttggattaggttcattagtaactgacgaaacgtttggcgtcgccattacaccttatttaaaaggagaagctatcaatgatcgttggatgcatggtcttaacatcacagcatatttattttgggcaatttcatgtgtagctggggctttatttggcgaatatatctcaaatccgcaaacgctagggttagattttgctatcacggctatgtttatctttttggccattgcgcaatttgaatcaattactaaatcgcgattaagaatttacatagtactcattattgccgtcatagtaatgatgttatcgctaagtatgtttatgccttcatatctagcaatattaattgcagccacaatttcagcagcgttaggagtgatgatggaacaatgataactcatatgaacatgttaatacttattttattgtgtggtatcgtaacgctattaattcgaattataccttttatcatgatttcaaaagtgcaattgcctgatgtcgtggttcgatggctatcatttatcccaatcacactatttacggcacttgtcattgacagcattattcaacagacgcctcatggtgaggggtatacattaaacatcccttacattatcgcgctcattccgacggttattttatctataatcacgcgtagtttaactattacaattattagtgggattgttatcatggcagcattacgatttttcttttaaaaataactgaaaatcattgaacagatatttaaacttaggtaaactgttagtaatcagaaaattctgatatacaaatcgtctatgttaagattgggaatcgtgtatacgtaagcgatttggctaacgcatgacaatgataacaacattttaaatgataaaagtaattcatcactgaatctcaactaacacataacaatttcatatttcttattgtgagaagttgagggacttggccctgtgatacttcagcaaccgactttatagcacggtgctaaaaccaacgagttactcgaatgataagtataaagacttcttacttttcaatagggtgagaagtttttttgtttaaggaggaaagaacaatgacaaattacacagtagatactttaaatttaggggaatttattacagaatctggggaagtcatagataacttgcgtttgagatatgagcatgtcggttatcatggacaaccattagttgtagtttgtcatgcattaactggcaatcatttaacatatggaacagatgattatccgggttggtggcgagaaattattgatgggggatatatacccattcacgattatcaatttttaacatttgatgttattggtagtcctttcggttcaagttcacctttaaacgaccctcattttcctaaaaaattaacattaagagatatagtcagagcgaatgaacgaggtatacaagcccttggttatgataagattaatattttaatagggggaagtcttggaggtatgcaagcaatggaactactctacaatcaacagtttgaagtagataaagccattatccttgctgcaacaagtcgaacatcatcttatagtagagctttcaatgaaattgcaaggcaagccattcatcttggtggtaaggaaggtctaagtattgcacgccaattaggttttttgacatatcgatcatcaaaaagttatgatgaacgtttcacgccggatgaagtagtcgcataccaacaacatcaaggtaataaatttaaagaacattttgatttgaattgttatctgacactgctagatgtattggatagtcacaacattgaccgaggtcgcacagacgtaacgcatgtttttaaaaatttagaaacaaaagtgttaacgatggggttcatagatgatttgctatatccggatgatcaagttcgtgcattaggtgaacgttttaaatatcatcgtcatttcttcgtgcctgataatgttgggcatgatggattcctactaaactttagtacctgggcacctaacttatatcatttcttaaatttaaagcattttaagcgtaagtaataatatatattttcaaagaatgaagccactaaatcacagttatcatattcaaaaacatctagagtacatgagagtggaaatgtattgtaaatctaaatcaagcttgattgctatgtagtgggattaaataatcatgttgaaaatgaaagcacacaaaagcgattcaaatgagtatgttaattacttataaaacatgaaagttattattcaattaaatgaaatagaagcatacaatctataaattgttaattttcattaaagaggttaaaataatagctatagttaaaaatatgggagtggcttatgtgttttcaaaaatacaacctaaagcaacaataattgcaacgattgcgttggtatttgtcgctttagctttatatctagtgcctggtttaggactaatatttgcattatttgcaaccataccaggtatcgttttatggaataaatcaatacaatctttcgggattagtgcacttattacagtaattataacaactgttttaggtaatactttcgttttaagtgccatcatattagtcttaattgcaagtttaattattggtcaattgctcaaagaaagaacgtctaaagaaagaatattatacgtaacaacagtagcgatgagcttaatttcattaatcgcttttatgttactacaaacattcggaaggattccaccatcagcgagcatagtaaaacctttcaagcaaacattacatgaagcgattacgatgagcggtgccgatgcgaatatgacccaaatattagaagaagggtttagacaagcgaccgttcaattaccaggtttcatcattatcattacatttttaatcgtcttaattaacttaatcgttacatttccgattttacgaaaatttaaaatcgctacacctgtatttaagccacttttcgcgtggcaaatgagcggtattttattatggatatacattattgttatcatatgtttattatttacaggtcaaccgagtgtgttccagagcattcttttaaacttccaacttgtgttatcattagtaatgtatattcaaggtttaagtgttattcatttctttggtaaagcgaaaggtttgccgaatgcagtaacgattttactattggttatcggtacaatactgacacctacgacacatattgtaggactacttggtgttatcgatttaagtttgaatttgaagcgaatcatgaaaaataattctaaaaagtgaatagaggtggaataatgaatcggcagtccactaagaaagctttactaataccatttgtcatcatgatcatcacagcaattgttttaatgggtgtatggtttatctttaatagtcttatagcactaattgcatctatcgttcttgtcgtgatgattattgttagcatcattttattcagacaagctttaatgaaaatggatagttatgtagatggtttgagtgctcaaatttcaacaacaaataataaagcaatcaaacatttaccaattggtatcattgttttagatgaaaatgatcacatcgaatgggttaaccaatttatgacagatcatatggaagcgaatgtcatttctgaatctgtaaatgaagtatttccaaacattttaaagcaattagatagagtgaaatccgttgaaatagaatataatcagtatcatttccaagtacgttattctgagaatgatcactgcctctatttctttgatataactgaacaagtacaaacaaatgaactatatgaaaattctaaaccaatcattgcgacattatttttagataactacgatgagattacgcaaaatatgaatgatacgcagcgttcggaaatcaactcaatggtaacgcgtgtcattagtcgatgggcaactgagtataatatatttttcaaaagatacagttccgatcaattcgtagcctatttaaatcaaaaaatattagctgacttagaagaatctaaatttgatatcttgagtcaattacgtgaaaaaagtgttggttatcgtgcccaattaacattaagtatcggtgttggtgaaggtactgaaaatttaatcgacttaggtgaattatcacaatcaggcctagacttagcattaggacgcggtggcgaccaagttgcaattaaaagtattaatggtaatgtgcgtttctatggcggtaagactgacccgatggagaaacgtactcgtgtaagagcacgtgtgatctcacatgcgttaaaagatatccttgcagagggtgacaaagtcattatcatgggacataaacgtcctgacttagatgcaattggtgcagcaatcggtgtgtctagatttgcaatgatgaataatttagaagcatacatcgtattaaatgagactgacattgatccaacattacgacgcgtgatgaacgaaatagataaaaagccagagttaagagagcgatttattacatcagatgatgcttgggatatgatgacatctaagacaaccgtagtgattgttgatacgcataaaccggaactggttttagatgaaaatgtcttaaataaagcaaaccgtaaagttgttatcgatcatcatagacgtggtgaaagcttcatctctaatccattgttgatatatatggaaccatacgcaagttcgacagctgaattggtaacagagttactggaatatcaaccaacagaacaacgtttaacacgtcttgaatcaacagtgatgtatgcaggtattattgtagatacaagaaactttacattacgaacaggatcaagaacattcgatgcagcgagttatttacgtgcacatggtgcagatacgattttaacgcaacatttcttaaaagatgatgtggatacttacattaatcgatctgaattaattcgaactgtaaaagttgaagataatggcatagccattgcgcatggttcagacgataaaatttatcatccagtaacagttgcacaagcagcagatgaactgttaagtttagaaggtattgaagcatcatatgttgttgcgagacgtgaagataatctgattggtatatctgcgcgttcactcggttcagtaaatgtccagttaacaatggaagcacttggtggcggtggacatttaaccaatgcggcaacacaacttaaaggtgtgacagtcgaagaggcgatagcacaattacaacaagcaattacagaacaattaagtaggagtgaagatgcatgaaagtaatttttacacaagatgttaaaggtaaaggtaaaaaaggtgaagttaaagaagtaccagtaggttatgcaaataacttcttattgaaaaagaattatgctgtagaagcaacaccaggtaaccttaaacaattagagttacagaaaaaacgtgcaaaacaagaacgccaacaagaaattgaagatgctaaagcattaaaagaaacgttatcaaacattgaagttgaagtatcagcaaaaactggtgaaggtggtaaattgtttgggtcagtaagtacaaaacaaattgccgaagcactaaaagcacaacatgatattaaaattgataaacgtaaaatggatttaccaaatggaattcattccctaggatatacgaatgtacctgttaaattagataaagaagttgaaggtacaattcgcgtacacacagttgaacaataaagttggattgaaataagaggtgtaaccattcatggatagaatgtatgagcaaaatcaaatgccgcataacaatgaagctgaacagtctgtcttaggttcaattattatagatccagaattgattaatactactcaggaagttttgcttcctgagtcgttttataggggtgcccatcaacatattttccgtgcaatgatgcacttaaatgaagataataaagaaattgatgttgtaacattgatggatcaattatcgacggaaggtacgttgaatgaagcgggtggcccgcaatatcttgcagagttatctacaaatgtaccaacgacgcgaaatgttcagtattatactgatatcgtttctaagcatgcattaaaacgtagattgattcaaactgcagatagtattgccaatgatggatataatgatgaacttgaactagatgcgattttaagtgatgcagaacgtcgaattttagagctatcatcttctcgtgaaagcgatggctttaaagacattcgagacgtcttaggacaagtgtatgaaacagctgaagagcttgatcaaaatagtggtcaaacaccaggtatacctacaggatatcgagatttagaccaaatgacagcagggttcaaccgaaatgatttaattatccttgcagcgcgtccatctgtaggtaagactgcgttcgcacttaatattgcacaaaaagttgcaacgcatgaagatatgtatacagttggtattttctcgctagagatgggtgctgatcagttagccacacgtatgatttgtagttctggaaatgttgactcaaaccgcttaagaacgggtactatgactgaggaagattggagtcgttttactatagcggtaggtaaattatcacgtacgaagatttttattgatgatacaccgggtattcgaattaatgatttacgttctaaatgtcgtcgattaaagcaagaacatggcttagacatgattgtgattgactacttacagttgattcaaggtagtggttcacgtgcgtccgataacagacaacaggaagtttctgaaatctctcgtacattaaaagcattagcccgtgaattagaatgtccagttatcgcattaagtcagttatctcgtggtgttgaacaacgacaagataaacgtccaatgatgagtgatattcgtgaatctggttcgattgagcaagatgccgatatcgttgcattcttataccgtgatgattactataaccgtggcggcgatgaagatgatgacgatgatggtggtttcgagccacaaacgaatgatgaaaacggtgaaattgaaattatcattgctaagcaacgtaacggtccaacaggcacagttaagttacattttatgaaacaatataataaatttaccgatatcgattatgcacatgcagatatgatgtaaaaaagtttttccgtacaataatcattaagatgataaaattgtacggtttttattttgttctgaacgggttgatatatgttaagtttgtgtattgaaagtgataaattagtactgtcaacgcctctgttaaagggtttttaggacgttgaaaacgatttgttaaaatgatttttcttttaaaaaggccgaaaatcaatgttcgatttttatttgcattatggtctcgatattggtagaatatcaaatggttaaatgagaaaaacttggaggtgctcacatgtcatcaatcgtagtagttgggacacaatggggagacgaaggaaaaggaaaaataacggatttcttggcagaacagtcagatgttatcgcgcgtttttcaggtggtaataatgcaggccataccattcaatttggcggagaaacatataaattacatttagtaccatctggtatcttttacaaagacaaattagcggtaatcggtaacggagtcgttgttgatccagttgcactattgaaagaattagacggattaaatgaacgtggcattcctacaagtaatttacgtatatctaatcgtgcgcaagtgattttaccatatcacttagcacaagatgaatatgaagaacgtttacgtggtgacaataagattggtacaactaaaaaaggtatcggtccagcatatgtagacaaagttcaacgtatcggtattcgtatggcagatttacttgaaaaagaaacattcgaaagattattaaaatcaaacattgaatataaacaagcatatttcaaaggtatgtttaacgaaacatgtccatcatttgatgatatctttgaagaatattatgcagcaggtcaacgtctaaaagaatttgtaacagacacatcaaaaatcttagacgatgcatttgtagcagatgaaaaggtacttttcgaaggtgcgcaaggtgtaatgttagatatcgaccatggtacatatccattcgttacatcaagtaatccaattgcaggtaacgttactgttggtacaggtgtaggtcctacattcgtttcaaaggtaattggtgtatgtaaagcttatacatcacgtgttggtgatggtccattccctactgaattattcgatgaagatggacatcatattagagaggttggtcgtgaatacggtacaacaacaggacgtccacgtcgtgtaggttggtttgattcagttgtattacgtcactctcgtcgtgtaagtggtattacagatttatctattaactcaatcgatgttttaacaggcctagacacagtgaaaatctgtacagcttatgaattagacggtaaagaaattactgagtacccagcaaacttagatcaattaaaacgttgtaaaccaatctttgaagagttaccaggttggacagaagacgtaacaaatgtgcgtactttagaagaattacctgaaaatgcacgtaaatatttagagcgtatttcagaattatgtaatgtacaaatttctatcttctcagttggtccagatagagaacaaacaaacctattaaaagaattgtggtagaactttatataagtcatacacaatgattataaatacatgagccttctatctttattggtaggaggcttttgttatgcttgcttctgtatcgattcgattatttagataaaaaatactaacgtaaaggcgatatttgctagtcataatttagaagattagatgatatttaacgaaaattaagatgaaatacttgaatgtaagaagtctgatgtcgaaaatagctattaaaatagagtagacgtaagtgtaaatgaaagcacctaaaatagaaaaatttcaaaaatagcgtaattattataatgaatagactgccaataaaatgcaatttttcacttataacattcttcaaaaaataatagcaaaattatgtaaaaaatatcttgtcatggcaagattggctgtgctataatctatcttgtgcttaagaacggctccttggtcaagcggttaagacaccgccctttcacggcggtaacacgggttcgagtcccgtaggagtcaccattttttaggtctcgtagtgtagcggttaacacgcctgcctgtcacgcaggagatcgcgggttcgattcccgtcgagaccgtacaaatgcctatccaagaggataggcatttttttgcgtttaatattatattaataaaagatatatggacgaatgataatcatattgatttatctgttcgtccattttctttaaaatgtatgaacctcaagtaacttagtggttggatatgaaagataaacgtagacaataaaatctttattagacgtacaaacatatgctactgtcaacatatttcttcgttgtgatatgccaccagtcctccataacatcaattgttaaagtaacgaataacgaataatgatatttattttctgagcaatgacgtgcaactagaagttgccattatcctaattttattattggaatagagacctcatcattgtgttaaatatcattgtcacaatccgccgtgagaaactaataaaaaatagtaatatataagtttatattggaaaatagaattaatagcttataaatggtaaattatataataggttactatacgttataagacggaaaatgcgcacaataacaaaaatagtaagcgacatcctgtgattttttacacaaacataaacgataaagaacaaaaaatgataaaataatattaatgatttaagaaaagaggtttatgcaaatggctagaaaagttgttgtagttgatgatgaaaaaccgattgctgatattttagaatttaacttaaaaaaagaaggatacgatgtgtactgtgcatacgatggtaatgatgcagtcgacttaatttatgaagaagaaccagacatcgtattactagatatcatgttacctggtcgtgatggtatggaagtatgtcgtgaagtgcgcaaaaaatacgaaatgccaataataatgcttactgctaaagattcagaaattgataaagtgcttggtttagaactaggtgcagatgactatgtaacgaaaccgtttagtacgcgtgaattaatcgcacgtgtgaaagcgaacttacgtcgtcattactcacaaccagcacaagacactggaaatgtaacgaatgaaatcacaattaaagatattgtgatttatccagacgcatattctattaaaaaacgtggcgaagatattgaattaacacatcgtgaatttgaattgttccattatttatcaaaacatatgggacaagtaatgacacgtgaacatttattacaaacagtatggggctatgattactttggcgatgtacgtacggtcgatgtaacgattcgtcgtttacgtgaaaagattgaagatgatccgtcacatcctgaatatattgtgacgcgtagaggcgttggatatttcctccaacaacatgagtagaggtcgaaacgaatgaagtggctaaaacaactacaatcccttcatactaaacttgtaattgtttatgtattactgattatcattggtatgcaaattatcgggttatattttacaaataaccttgaaaaagagctgcttgataattttaagaagaatattacgcagtacgcgaaacaattagaaattagtattgaaaaagtatatgacgaaaagggctccgtaaatgcacaaaaagatattcaaaatttattaagtgagtatgccaaccgtcaagaaattggagaaattcgttttatagataaagaccaaattattattgcgacgacgaagcagtctaaccgtagtctaatcaatcaaaaagcgaatgatagttctgtccaaaaagcactatcactaggacaatcaaacgatcatttaattttaaaagattatggcggtggtaaggaccgtgtctgggtatataatatcccagttaaagtcgataaaaaggtaattggtaatatttatatcgaatcaaaaattaatgacgtttataaccaattaaataatataaatcaaatattcattgttggtacagctatttcattattaatcacagtcatcctaggattctttatagcgcgaacgattaccaaaccaatcaccgatatgcgtaaccagacggtcgaaatgtccagaggtaactatacgcaacgtgtgaagatttatggtaatgatgaaattggcgaattagctttagcatttaataacttgtctaaacgtgtacaagaagcgcaggctaatactgaaagtgagaaacgtagactggactcagttatcacccatatgagtgatggtattattgcaacagaccgccgtggacgtattcgtatcgtcaatgatatggcactcaagatgcttggtatggcgaaagaagacatcatcggatattacatgttaagtgtattaagtcttgaagatgaatttaaactggaagaaattcaagagaataatgatagtttcttattagatttaaatgaagaagaaggtctaatcgcacgtgttaactttagtacgattgtgcaggaaacaggatttgtaactggttatatcgctgtgttacatgacgtaactgaacaacaacaagttgaacgtgagcgtcgtgaatttgttgccaatgtatcacatgagttacgtacacctttaacttctatgaatagttacattgaagcacttgaagaaggtgcatggaaagatgaggaacttgcgccacaatttttatctgttacccgtgaagaaacagaacgaatgattcgactggtcaatgacttgctacagttatctaaaatggataatgagtctgatcaaatcaacaaagaaattatcgactttaacatgttcattaataaaattattaatcgacatgaaatgtctgcgaaagatacaacatttattcgagatattccgaaaaagacgattttcacagaatttgatcctgataaaatgacgcaagtatttgataatgtcattacaaatgcgatgaaatattctagaggcgataaacgtgtcgagttccacgtgaaacaaaatccactttataatcgaatgacgattcgtattaaagataatggcattggtattcctatcaataaagtcgataagatattcgaccgattctatcgtgtagataaggcacgtacgcgtaaaatgggtggtactggattaggactagccatttcgaaagagattgtggaagcgcacaatggtcgtatttgggcaaacagtgtagaaggtcaaggtacatctatctttatcacacttccatgtgaagtcattgaagacggtgattgggatgaataataaggagcatattaaatctgtcattttagcactactcgtcttgatgagtgtcgtattgacatatatggtatggaacttttctcctgatattgcaaatgtcgacaatacagatagtaagaagagtgaaacgaaacctttaacgacacctatgacagccaaaatggatacaactattacgccatttcagattattcattcgaaaaatgatcatccagaaggaacgattgcgacggtatctaatgtgaataaactgacgaaacctttgaaaaataaagaagtgaagtccgtggaacatgttcgtcgtgatcataacttgatgattcctgatttgaacagtgattttatattattcgattttacgtatgatttaccgttatcaacatatcttggtcaagtactgaacatgaatgcgaaagtaccaaatcatttcaatttcaatcgtttggtcatagatcatgatgctgatgataatatcgtgctttatgctataagcaaagatcgccacgattacgtaaaattaacaactacaacgaaaaatgatcattttttagatgcattagcagcagtgaaaaaagatatgcaaccatacacagatatcatcacaaacaaagatacaattgatcgtacgacgcatgtttttgcaccaagtaaacctgaaaagttaaaaacatatcgcatggtatttaacacgattagtgttgagaaaatgaatgctatactatttgacgattcaaccatcgttcgtagttcaaagagtggtgttacaacctacaacaataatacaggtgtcgcaaactataacgataaaaatgaaaaatatcattataaaaacctgtccgaagatgaagcgagttccagcaaaatggaagaaacgattccaggaacctttgattttattaatggtcatggtggtttcttaaacgaagactttagattgtttagtacgaataatcagtcaggcgagttaacatatcaacgtttccttaatggttatccaacgtttaataaagaaggttctaatcaaattcaagtcacttggggtgaaaaaggcgtctttgactatcgtcgttcgttattacgcaccgacgttgttttaaatagtgaggataataaatcgttgccgaaattagagtctgtacgttcaagcttagcgaacaatagtgatattaattttgaaaaagtaacaaacatcgctatcggttacgaaatgcaggataattcagatcataatcacattgaagtgcagattaacagtgaactcgtaccgcgttggtatgtagaatatgatggcgaatggtatgtttataacgatgggaggcttgaataaatgaactggaaactgacaaagacacttttcattttcgtgtttattcttgtcaacatcgtgttagtatcgatttatgttaataaagtcaatcgctcacacattaatgaagtcgagagtaacaatgaagttaattttcagcaagaagaaattaaagtaccgactagtatattgaataaatcagttaaaggtataaaattagagcaaattacagggcgatcaaaagactttagttctaaagctaaaggcgattcggatttgaccacatcagatggtggaaaattattgaatgcgaacattagtcaatcggtaaaggtcagtgacaataacttaaaagatttgaaagattatgttaacaagcgcgtatttaaaggtgctgaatatcaattaagcgagattagttcagattctgtaaaatatgaacaaacgtatgatgattttccgattttaaataacagtaaagcgatgttgaactttaatatagaagataacaaagcgactagttataaacaatcaatgatggatgacattaagcccacagatggtgcagataagaagcatcaagtgattggtgtgagaaaagcaatcgaggcattatattataatcgttacttgaaaaaaggtgatgaagtcattaatgctagactcggttactactcagtcgtgaatgaaacgaatgttcaattgttacaaccaaactgggaaattaaagtgaagcatgacggtaaggataaaacgaatacttactatgtcgaagcgacaaataataaccctaaaattattaatcattaatatgaatcgtaataagctagcattgcaagctcatcatatgtgagaagcggtgctagcttttttgctggtacggtttattatggctgatgtttttgcgtctccaacgtgcgcatttattcatattttaagtagaaccgcattgtaaaattagtgtaactgttattttaaaaactttagtatttgtctaatcattgttataataattaagaaattcattgcacgtgattatcaaaatttaaatataagaaaccggtcgatgaactaaagttacataataggaaaggtatacaaaacagctaatatactgatagtttctgtagggaaaatcgtatatttgcactgatgtatattgcagtcatatagagagattgactgtttaaagagaaaggatgagccgcttgatacgcatgagtgtattagcaagtggtagtacaggtaacgccacttttgtagaaaatgaaaaaggtagtctattagttgatgttggtttgactggaaagaaaatggaagaattgtttagtcaaattgaccgtaatattcaagatttaaatggtattttagtaacccatgaacatattgatcatattaaaggattaggtgttttggcgcgtaaatatcaattgccaatttatgcgaatgaaaagacttggcaggcaattgaaaagaaagatagtcgcatccctatggatcagaaattcatttttaatccttatgaaacaaaatctattgcaggtttcgatgttgaatcgtttaacgtgtcacatgatgcaatagatccgcaattttatattttccataataactataagaagtttacgattttaacggatacgggttacgtgtctgatcgtatgaaaggtatgatacgtggcagcgatgcgtttatttttgagagtaatcatgacgtcgatatgttgagaatgtgtcgttatccatggaagacgaaacaacgtattttaggcgatatgggtcatgtatctaatgaggatgcggctcatgcaatgacagacgtgattacaggtaacacgaaacgtatttacctatcgcatttatcacaagacaataacatgaaagatttggcgcgtatgagtgttggccaagtattgaacgaacacgatattgatacggaaaaagaagtattgctatgtgatacggataaagctattccaacgccaatatatacaatataaatgagagtcatccgataaagttccgcattgctgtgagacgactttatcgggtgcttttttatgttgttggtgggaaatggctgttgttgagttgaatcggcttgattgaaatgtgtaaaataattcgatattaaatgtaatttataaataatttacataaaatcaatcattttaatataaggattatgataatatattggtgtatgacagttaatggagggaacgaaatgaaagctttattacttaaaacaagtgtatggctcgttttgctttttagtgtaatgggattatggcaagtctcgaacgcggctgagcagcatacaccaatgaaagcacatgcagtaacaacgatagacaaagcaacaacagataagcaacaagtaccgccaacaaaggaagcggctcatcattctggcaaagaagcggcaaccaacgtatcagcatcagcgcagggaacagctgatgatacaaacagcaaagtaacatccaacgcaccatctaacaaaccatctacagtagtttcaacaaaagtaaacgaaacacgcgacgtagatacacaacaagcctcaacacaaaaaccaactcacacagcaacgttcaaattatcaaatgctaaaacagcatcactttcaccacgaatgtttgctgctaatgcaccacaaacaacaacacataaaatattacatacaaatgatatccatggccgactagccgaagaaaaagggcgtgtcatcggtatggctaaattaaaaacagtaaaagaacaagaaaagcctgatttaatgttagacgcaggagacgccttccaaggtttaccactttcaaaccagtctaaaggtgaagaaatggctaaagcaatgaatgcagtaggttatgatgctatggcagtcggtaaccatgaatttgactttggatacgatcagttgaaaaagttagagggtatgttagacttcccgatgctaagtactaacgtttataaagatggaaaacgcgcgtttaagccttcaacgattgtaacaaaaaatggtattcgttatggaattattggtgtaacgacaccagaaacaaagacgaaaacaagacctgaaggcattaaaggcgttgaatttagagatccattacaaagtgtgacagcggaaatgatgcgtatttataaagacgtagatacatttgttgttatatcacatttaggaattgatccttcaacacaagaaacatggcgtggtgattacttagtgaaacaattaagtcaaaatccacaattgaagaaacgtattacagttattgatggtcattcacatacagtacttcaaaatggtcaaatttataacaatgatgcattggcacaaacaggtacagcacttgcgaatatcggtaagattacatttaattatcgcaatggagaggtatcgaatattaaaccgtcattgattaatgttaaagacgttgaaaatgtaacaccgaacaaagcattagctgaacaaattaatcaagctgatcaaacatttagagcacaaactgcagaggtaattattccaaacaataccattgatttcaaaggagaaagagatgacgttagaacgcgtgaaacaaatttaggaaacgcgattgcagatgctatggaagcgtatggcgttaagaatttctctaaaaagactgactttgccgtgacaaatggtggaggtattcgtgcctctatcgcaaaaggtaaggtgacacgctatgatttaatctcagtattaccatttggaaatacgattgcgcaaattgatgtaaaaggttcagacgtctggacggctttcgaacatagtttaggcgcaccaacaacacaaaaggacggtaagacagtgttaacagcgaatggcggtttactacatatctctgattcaatccgtgtttactatgatataaataaaccgtctggcaaacgaattaatgctattcaaattttaaataaagagacaggtaagtttgaaaatattgatttaaaacgtgtatatcacgtaacgatgaatgacttcacagcatcaggtggcgacggatatagtatgttcggtggtcctagagaagaaggtatttcattagatcaagtactagcaagttatttaaaaacagctaacttagctaagtatgatacgacagaaccacaacgtatgttattaggtaaaccagcagtaagtgaacaaccagctaaaggacaacaaggtagcaaaggtagtaagtctggtaaagatacacaaccaattggtgacgacaaagtgatggatccagcgaaaaaaccagctccaggtaaagttgtattgttgctagcgcatagaggaactgttagtagcggtacagaaggttctggtcgcacaatagaaggagctactgtatcaagcaagagtgggaaacaattggctagaatgtcagtgcctaaaggtagcgcgcatgagaaacagttaccaaaaactggaactaatcaaagttcaagcccagaagcgatgtttgtattattagcaggtataggtttaatcgcgactgtacgacgtagaaaagctagctaaaatatattgaaaataatactactgtatttcttaaataagaggtacggtagtgtttttttatgaaaaaaagcgataaccgttgataaatatgggatataaaaacgaggataagtaataagacatcaaggtgtttatccacagaaatggggatagttatccagaattgtgtacaatttaaagagaaatacccacaatgcccacagagttatccacaaatacacaggttatacactaaaaatcgggcataaatgtcaggaaaatatcaaaaactgcaaaaaatattggtataataagagggaacagtgtgaacaagttaataacttgtggataactggaaagttgataacaatttggaggaccaaacgacatgaaaatcaccattttagctgtagggaaactaaaagagaaatattggaagcaagccatagcagaatatgaaaaacgtttaggcccatacaccaagatagacatcatagaagttccagacgaaaaagcaccagaaaatatgagtgacaaagaaattgagcaagtaaaagaaaaagaaggccaacgaatactagccaaaatcaaaccacaatccacagtcattacattagaaatacaaggaaagatgctatcttccgaaggattggcccaagaattgaaccaacgcatgacccaagggcaaagcgactttgttttcgtcattggcggatcaaacggcctgcacaaggacgtcttacaacgcagtaactacgcactatcattcagcaaaatgacattcccacatcaaatgatgcgggttgtgttaattgaacaagtgtacagagcatttaagattatgcgaggagaagcatatcataagtgatgcggtttttattaattagttgctaaaaaatgaagtatgcaatattaattattattaaattttgatatatttaaagaaagattaagtttagggtgaatgaatggcttatcaaagtgaatatgcattagaaaatgaagtacttcaacaacttgaggaattgaactatgaaagagtaaatatacataatattaaattagaaattaatgaatatctcaaagaactaggagtgttgaaaaatgaataagcagacaaatactccagaactaagatttccagagtttgatgaggaatggaaaaaaaggaaattaggtgaagtagtaaattataaaaatggtggttcatttgaaagtttagtgaaaaaccatggtgtatataaactcataactcttaaatctgttaatacagaaggaaagttgtgtaattctggaaaatatatcgatgataaatgtgttgaaacattgtgtaatgatactttagtaatgatactgagcgagcaagcaccaggactagttggaatgactgcaattatacctaataataatgagtatgtactaaatcaacgagtagcagcactagtgcctaaacaatttatagatagtcaatttctatctaagttaattaatagaaaccagaaatatttcagtgtgagatctgctggaacaaaagtgaaaaatatttctaaaggacatgtagaaaactttaattttttatctcctaattacactgaacaacaaaaaataggtaatttcttcagcaaactcgaccgccagattgagttagaagaagagaaacttgaactcttagagcaacaaaagcgtggatatattcagaagattttttctcaagatttaagatttaaagatgaaaatggaaacagttatcctgattggtctattaaaaagattgaagatatttctaaagttaataaagggtttactccaaatacaaaaaatgataaatactgggatgaattaaatgaaaattggttatctatagcaggtatgacacagaaatatttgtataaaggaaataaaggaattactgaaaaaggtgcatcaaagcatgtaaaagtagataaagatactctaataatgagttttaaattgactttaggtaagttagctatagtaaaagagcctatctatacaaatgaagctatatgccatttcgtatggaaagaaagtaatgttaatactgagtatatgtactactatttaaattctataaatataagtacttttggtgcacaggcagttaaaggagtaacattaaataacgatgcaattaatagtattatagtaaagttaccagtgatacaagaacaaaataaaatagcatactttttcaataaattagataaattaattgaaaaacaatcttctaaagtagaattattaaaacaacgcaaacaaggatttttacagaaaatgtttgtttaattcttataaagttctattatgtaaaatattaaatagagataacattatgaaagcgagcccaagacataaagtttttgaataaataaaaaagataatttctatcaaattaatatagaaattgtcttttttataaattttttgattatttttagctgattgagctgttacttttcttataataagtgctattagcacaaatcctagttctcttttggctttgtttattcctcttacggacattcgagtgaaacccattttaattttattagaagtaatttaggtttgaacccacctaaataaatatatgagttatttttttatgctacaaaatatattcagatttcaataatgacataaaataggcatctttatatttacctttagtgtagaattgctctttgagtaatccttctgttttaaatccttgtgactcgtatatatgcacagcttttttgttatctgtatcaacatatagataaattttgtgcatgtttaatatatcgaatgcataatttatcgctttttcgaatgcgaattttgcataacctttaccactgaactcaggtttaataattatttgtatttcacaattacgatggatgtaattaatttctactaattcaacaatacctacgacttgattttcatcttcaacaataaaacgtctctctgattcatctaataaatgcttatcaaataaatattgaagttccgttaaggattcatatggttcttcaaaccaataagacataatagaatattcattatttaattcatgaacaaaaagtaaatcactatactctaatgctcttagtttcataattccactcccaaaattttctcatatatttgcattataaatataaataacgaataagtcatcattcactgtgaatactctattttaacaattcaccacatactaattctcattttcttgttattctcgatttattactcttactatgaaacctataaaattctcacatttgtttgtattaagaataaatacgtcgatagtaacaataaaaaaataaataataaagcatccctcaccgtaaaagtgaaggatgctctagttttattgaaatatacatttcattttgttaaataattattaataatattttgaaaatcattattacgtgaaatcttcatagattttatcaagtatttctttgccttcaattgctgtgaagtgatgtaccaatctatttttacaatcatatgtaattttgtgacgctaggtaattagtaattgttcgtcagtctgattgtatagtatcaagtttcatagataatactctttgattttaatgtccactttgacgtgctttaagattgagtatatacataatgtcattgtggaatgttaaaaatcctacaaatgtttattcatctgcaggatttttaaatctccaagaataaaaatcatcataggacaactggattattgtttggataaataacgtaaacaataattaggtactattatttatttttgtttattctttttcctaacaaaataaagaaaagaataaacgcaattgttaaaaatatgtgtcctaaaccagcaataccagcaatagcaggacttacacttagatctttaatggtagaaataccgttcacgaattgcattgccacagtaacaagcacacctaaatggtatatataaaagaaactgttaaacagctttgtatgagttgttaatttgaattggccctcgataatcatgaaaattaagaacataattgtacctagtactaataaatgtgtatgtgtaacatttaattgagaaaaaccgctaaaatcttccgcttttgtcatttctctataaaatagaccacttaataaccctaatagtgtatagagcgctgaactatacattaatcttttcattttaattccccctatttttaattacgagataagtatagcggtagtttatgaactgagtatgaacttacaacaaaaaaattaatgaagtactttacaataaactcaatttattagatggtggagggacgaaaaaggattttagaaaaataaattaatatatttttattttgataagtaataattaataatatcttggaaatcattgttaagtattgttgtaatacaatcgtcattcataaaatcttcatagattttatcaagaatttcttcatcttcgatagatgtgaaatgattagctaacccttttataatttaagtgtaatttgtgaatctaaacaactagcaactgttcgccaatctgattgtgtagtgtcatggttcatagataatcctccctttattttaatgtccatttttgacgtgctttagggttaagtggatgcataacttcgttcgttactggattaatgagttttttgactttctttttatgaggttttaacatttccatcacttgctcaacacgttcgacgacaacaggccgcttcgcataagctccataggctagaatcactgtgtcactttcactaatcgctttcattaagtgaatgtctgtgtgtttgtcataaggctctttaatatgtttaaggttttcaggtgttttaatattagagaatagatttactagatatacagcaccgtattgttcagaattagctaattggttgagaatgagaacagtggtaagatcgagtgataatacgccatctaaatgtggatacatcgttatcactgtacaagagggtttcttttcatcccatattttcttgagtaagtagcggtgttgttcatcgtcgctaaatatagcttctgtgtgtatcgtacttttgattgtattcatatatcgttaccccttttaatattcttctggcaaaagcatcacataataaaaagcgtctacgtcatcttcacgaatgacgtagactttcttaggtaatgcattttgattttttacatagtttgtatagtgatattccaatttgtatgcaggttgttcttgttcatgtgtgattgagagtatattctcatcttcttgtagtctaaaaatgtgtagataatctgtatgagattgattatctctttcttttaccatattccaaagtaggatttgaaggtctagagatagttgttcacttatgcctcttgtgatgtatcgattgattttcatgttattttacctcgtcttgaatttctttcataatgataattgcttggctaataatcgtaacagatatttgtgccactttgatccaattattcatggttattctctccttgttttagtaaatgacgttcatcgataatcgtatttttagtatctgtgaggtatagaaagtccatatcaaaatgatccaaataaccaatgctgatgagttggtcattggcgtacataagaaatggatagatacttagctcatgtagctcatcattgtagtaggtataagtgttgagtgtgagatgcgcaagtagagaattattaataaaacgttccggtagaatattttctgctgcttcctcaagtgcttcacattcccatgtttcgttgttagatagttggaagagacgagttatatattgtttgagttcttgagtggttgttttcatatcattgcctcctagatagtgtgatagtgatgtagttgatatacatcattgggataatatatatttgatttattatttattacgaatcccggtgggaataagagaaaattccatataaaaacccgtgataaatgttggtgtaacaaggaaatcccggaatcccactcattttgacgaacaatcaactcattatttataagtattgatgatagggttgtgtctctgcttccttatatatattatttatttataaaaaataacgggattttgggattgtgcttgcacaatccttctgcttcttcgaatctgcaaatcccattcctttcccggtaaaaaatcattgtgggatgttctttagcaatttcaatataagcattgtgtagtcatgaaaaaaatgacggcaatgactgtttcattagataagtgttattgaaattgataaagagaattctaaaaatggttagataaaataagtgaaagaatagcagtgtagttattgtttattcaatagttatatataaagtttgtggcaaaaataaagacgaagtgctagggagcacttcgtcgagtggatggttattaaatagttgtttgattatatcattatttaacttgagcgtaacataaaattgcttcttatgatgctcatcttttcttatgtcaatgcgatcgatgattgttagatatagtgatttcaactgagatttctctaatttgtctatatctttgaatattgcttgtagtacattcgcaatcatatcagcatcataatgtggagcttctgcttgtttatcttgttctagttgatagatttgattatttatttgattcaattcatcttggtagctaagtattgttggttttaatacgctatctaagtcaggtgagtcttcaatagttttcgttaatgtatgcatttttgcttttatttcttcacattgtgactgtttataggcaatatcatggttcaaagaagagacgtctatttgacttttttcatttaccttttcaaccaattgcttcaatacctttttgcttttgataatttccaatatctgatccataacatatttttctagtacatctgctctaacgctattggcagaacaaacttttgaacctttatttctaaaattgctacatgagtaatatctgattcttttcttagtgccatcttttaatgtattagttgtattacttgccgccattgctgcaccacatttcggacattttacaatcccagtcagtaggtttgttcctttgccgtgaacttgtggtttcttgcgactctcttgacgtttaaactgtactttatcccataggtttctatcaataataggcgcatgtttaccatcagcgataatcggttcctcattgagtccttttcgtcttttatcgctccagtgtctatacttcgcaaactgtatctttccaatgtaaaaagggtttgagatgatgtaggtaatggacgaaatactaaaaggtttccctttcttagtcacataacctttatgattcaatgcgttcgcaatcttacgataaccatgacctttagcgtatgaatcaaaaatatatttaacaatattcgcttcatgttgattgatcatgagctcttttttactgtcaggtactttatcgtagcctagaggtaaattaccttgataataaccttcaatagcacgttgtctttggccattgtagacattctctacaatcgtattacgttcaaattctgcgaagctggctaaaatttggagcatcaatttacctgttgaactggcaatttctattttttcagttagactaaaaaattcgacattaatcttatacaattcctcgacaatatttaacaaatctgaggtatttctagctaaacgatttgttttgtagaccataatacaatctaatttaccttcgttggcatcttttaacatacgttgtaattctggacgttgcattgttttacctgatataccacgatcggtgtattcattgacgacttcatagccttgaaattgacaatactctgtaagttgattcaattgaccttgaatactgtaaccatccgtttgcatttcagtcgatacacgtgcatataatccaatacgtttctttttgagttgtttcatattacttcattcctttcaggagttattaaatgtgattgttcaacgatattgagtggactgtttttaaagtagattccttgtaattgtttagtttgagttattttgatgcaatcgataaaaggtgctatatcctgtaaagttattttattttttatgacatattttaatttgtcatcgatttggtaggttgaataagtagagtaattctcttcacttttacaactagcagataaacgtttgaacgtttttacatcaatacgattttgagctagcttttcgataagttgttcttgtgttagatgggtttctttatgcttcatttgttgctgttttaggactttgagtattgtgttattcaatcgtttatgaaacgattgttcttcaaaatactttttacaagtgtcgagcacttcactttcaagttctggtgcattgatacttttaaatgggcatgtacgataagcgtcattcatatttttaggacaaacatagtaacgtagagaatagttctctttttttatcgttaagtttgttaatgttgattgacagtaaggacatttgattcgtcgctttagcttatttctagaattggatcgattgagttgtttatgaatacgacgctcttgtgcttcttcaaatgtatcaatatcaataataggtggaacgatatcattaaacgtgccatatttattgatgacacgaccgcaatagttagggttcaagagaatatttctaacttgatagggcttacgaggaataaggttaggattactatccaaatgttgggaaatctttttgtagcctagaccttgtaagtaccagcgataaaccgatttaactgtatacgcttcttcttcttgtacaacaaaacaaccttttctataacgatagccaaacggagcatgagttgtgattagcttaccttgtttggctttttctctaatcccattttttgtttgttcgctgatattgtttgattccatttccgctagactcataagtatgttcaaacgaaagcaatcaaactctttagacaaatcaaaatatccatcgttaacactgatgattgtgatgtgatgctttttacaaatttcaaagaattgtatggcatttttcaaattacgatgtagtcggttcaagcgatagcaacacaatactttacattttccagacgtaattatttctaccattttttgataacctgaacgttttgtatgtcgacctgttttcttatcatcataaaacgccacattagaccatccatattgcttagcggtatccataatgagcgatttttgagtagctaagctttgttgtttgagtgtactttgacgtacataagcaatcgcttcttccatgttatacacctccaaaaagataatatatatttgtgagtaaattagaatgaaaggtccaacgtgcttttaacacgttggaccgtcgtgattagttatcgttctgtagctcttcaacgactaaatcagctagtaattcaatcaattcatccattttatctactcctgtacgatttcatctttaagttattaaaaatcaattaaatcatcgttctgttttttccatgattcaagtatctttttgttatccaagttaatttcagctttaataggttcagcatctttagttagaccaaaaatagacgcatattttgaatctagctttaaatggtaaaagacaagtgactgtttcttgccatagtcatctttaactgctcttttcgtagttattcgatcacggtcagattcgataaatcctttatcccttagtgcattcacaacattgttgacatcttggaaatgatgctctatcaacatattcttaaatacagatgcaatgattttaacttcgatataatcatcttttaaggcaattagtccatagttctcaatcatattctttaatgctgtatcatcagaaaacttaccacggttttgtgctacaaattgcgtaatgacttcaatcgctttatcagccagtgatcgttcagagactgtatgagcatgataatcaataaagtagtctcttattttagcgatatcaatatctgtagataaaacatgactaagaatcttggccgaagtagtgatagccgcatagcgcttaaacatacgaataccagtattatttgtttcatccttcaatttatctttaaaccaatgatgtaattcaaaaacggatcaaaaaacaaaaggccctagaaactaggagcacacttacacaagaacaattgatagataaattagctaaaggagccatcgatgcagaaacgttcagaaaacaatctcaatcgttacttcaacaatcaaaaccaacactatcaataaatgagcaacaaattcaaaggtcttttgaaaatgtaattcaacaacacttcacgttaagcatgttataccgatatattgatgaaattcatatttctaaaaacaaaagccttgtgggaatctatttcaaaaatgaaccgctaaacattgtaaaccaagctacgcaatcatcgattgcttaattaatgaaaggatgaaaaatatgaaagaaatgaaaagaaaatctgtaggatgttatgttagagtttcaacaatttctcaagacattgataaatttagtattaatggtcaaattacacaaataaaggaatattgccaacagggaaattatgaattgctatactgataattaaaagtacccccgatcgaacgaaaatatctttttgatgactattagtgataattgtaattttatccattaatagatgaatggattggaataatactaagcctattgctattccaccgagtaaaattacccacccgcctaattcaatactttccggaatcatttcaaaaaataataagccaattataaggcctgcacataatgaataaataaagccatgaccactttgaaaaccttccattatccaagcgagtccaccgccaacaccaattccaagtgcggaagctaacgcccgatcatccatactgcactcatcccactattcttaaaaaggctttgtttattttactctaaaaaatcaaaacaaaatatatgaattcatattaaatattatttgactctttattcagatggttatatcatatatatgaacatatattaatacatgtagataaatagtgattattatatataaggttttgaattgaaacctaaagtgagggaaggataatggaagaaaaaaaggaattagaggaagtaaataataaggacttagatgatgaaacattatttgtcgtatcgcaaacatttaaagcgttaggtgatcctacgagaatccggattctccatttgctcttttataaggagtattcggtaaacggtattgctgaaacgctacatcttagacaatcaacagtttcccatcaattgcggttcttgaaaaatttacggttagtaaaattccgaagggaaggcacaacattgttttattcccatgatgatgaacatactatgaatatgctaaaacaggcgatcgatcacgcctgtcatcactagtattccgtaaaccagtaatgagtgttaataataattcacgtcattaatattgttatatgatcatataaaaatattataggcatatgaaaagggggttttgcaatggatatggaaaacaaaaaaacagaatggaaagcgttgtatgatatctcgaaggaaagtgagatgggtgtagcagagagggttagtgaatacggttgataaattcataggatgtattattggatacaaaaagtttggatgtggtcaattaacgtcctggtttagtaaagcttactgcgaatatattggaacccgatatatcatatttatttagaaaggtgatagaaatgaaaaatattcaagagcaacaagcacacgaaagtcatagccacgatcatagtcatgatcatgatcacggaaaaatgccaattatttcatattttattggcttagtgttggctataattgggctttttttaagtgatgcaaatttattaatacaaaacatcttattttcaattgccacaatcacagccggctaccatgtaattattctcgaaggaattggagagacagttgaaaatactaaattaaagggaaaattcactcctaattctcatattctaatgggattagctgcaatcggggcttctctgatagggagtttttgggaaggaacccttttgatacttattttttccggcgctcattttcttgaagattacgctgaaggaaaaagtaaaagagaaattactaagctactcgaaatgaacccaacgacagctaaattaatcctacctgatggaaacacaaaaattgttgatgtcagtgaattaaaagttggagatcaactccaagtgctgaacggtgatcaagttccaattgatgggattattttatccggtactacctcaattgatgaatcttctattaatggagaaagtataccgaaagagaagtctaagggtgacgaagtttttggaagtacgattaatggaacaggtacttttactatggaagtcactaaggaaaacaaggatactgtattctctaaaattttacaattagttagtcaaaaccaagataatcaaacaaaagctgccagtatcattcaaaaattcgagcctaaatatgttaatatagttttaatcgcaataccattagtaatgttacttgctccttttctatttgattggacatggtcgcaaagtgtatacaggggattagtgcttttagtcgcagcttcaccgtgtgctttggcagcagctactgtatctgtaacattgtctacaacatctaacctagctaaaaaaggcgtgctttcaaaaggaagtacttacctatcacaattagcggatatagatgcaattgccttcgataaaacaggaacccttacgaacggagaacctaaagtaacaaattactatttcactcattctgtgaacgaagaaaatattattgatattatagtcgcccttgaaaaggaatccaatcacccactcgctaatgctattttagaaaaatttgaagttaaaaataaaatagacatcgaagttactaatcaaattggaaaaggtctgacaggagattataatggaaaaaattatcgtattggtaagcctacttcttttgaaagtgcttctgaagagtatacccagttcaatcatgattgggcatcagaaggaaagacggttgtatacgtagcagaaaatgaagaagttattgggattatagctctaatggatattccgaatgagcatgctaaagaaacaattaattactttaagaaacttggtatccacacgactttaattactggtgattcggaaatgacgggaaaagctgtaggcgaacaattgggaatagacgaagttatcgctaatgtaatgcctgaagataaatccagaattatagaagaacaaaaagaaaaatttggagttactgccatggttggagatggtgtgaacgatgcaccggcccttgttaatgctgatgttggtatagctatggggggcggtactgatgtggcagtagaagtatctgatttggttttaatgcagaacaatttatctaaattagtacagtctcataaaatttcctcaaatatgggtcgtgttattaggcaaaatattattttttcaatggcagttgttgcctttttagttgtcgttagtttgttaggattaactgatattacaatcagtgtaattgttcatgaaggaagtactttagttgttatactaaatggacttcgattattaagatctaaataatgaacgaatcgattgacatgaatgaactttgaagtgtggattctacaatgttcccataacattggacactaaaaaacagagcaatctaataaagatgttatgagtaaaaacaatgccttgcataccgtttttatcatacgggcggtcaaataagcaattaaagagcatgggaagcataaaatcataaacagtgacttaaggcagccagtttacattcaaaagttaaattgactgtattaaaagtttcgaaacgattaatatccgtatgggggcaagcgtcgagccaaagataatgccaggacagagcgtctttttccgttcttttaagtgggaaaggttttaccttctctatgccaagacagtcccagagctaaaagggccagttgctctttttgggcgtttgtgaacggtaatcgcaggaaggggattttcccaaccgcacctggttttccatcacaataaagttggcggcatttgttctgatattcttgggaatacttacactatgaatggccgtattaagtgatacaggagctgctattattgtaatactgaatgctctccgccttttgagggtaaaagaataaaagtaaggataactaggtaaagctgttcaatcaaaaattgaacagcttatttttcatcaaaatcaaaaacgtttattataatacctacacttgttctgttaaatgtaccgattttttaaccttattgtatcagtaatatcttgaaacgaagtaagcgactaaaatttctcttttatcatacgtttataaaaatacacttttaagaacggtttgaaaatttttgaaatagatcaaaataatcttctggttaaaaaacctgtagatatgatttctctcttaaatttttgtttgattagattagaccctaataagacgcattcaatatgtctacacgtgaatttagtctttgaaaatgtaaggaccattattattataaaaaccccagtataaaacgatacgctgaagcgtatcataagtgatggtaaaaaatatgagtaagtagatgaagagtgaaaatcagattaattaataataatgtatcaaatttaaataaaggggtttttaagtatgaatttaagaggtcatgaaaatagacttaaatttcatgcgaaatatgatgtgacacctatatcacatttaaaattattagaaggtcaaaagaaagacggtgaaggcggcatactgacagatagctattactgtttttcatacagcttaaaaggtaattctaaaaaagttttaggtacgtttaattgtggttatcatattgctgaagatttactaaaattatcaaatcaagataaattacctttatttaacccgtttaaagtaattaatgaaggtaatcaattgcagggcgtaacgaataaaggtaatttaaatattaataggcaaagaaaacagtataatgaagtggctttacagctttcaaatgctattaatttaatcataatttgttatgaggataatattaaagaaccactttcaacgataaaatacgaaaccgataaatattattatagtgaaccatatgatagtaaaataaaagcagtaaatactattataggtaatttgtttgataagaaattagttgagaagatatctgaaattaatgtaaatcagaaaattagaaaatttgatttttcattactcactaataaaattaaaaaatataagatacaaaataattttgaataagtggatgtaagcaaatgttaaatatagaagttagtattaaggatactcaagatattataaattattttattgaatgtgacgttaatgataactattatgaaagtgagcaaagaagcagtctcggaaagttagctttagaattggacaaagtaagtaatcagttaaacaatgaaaatattgaagatatgaaaaagataattgaaaaagtagcagaagcaaatagagttatcgctaaatcttctttaagaaaaaattgagtgttttagtaagatgattgaagttgataataaaatctactaatcaaaagaaattttaaatatatattgagttaaaacttgaaaaacttatgtctaaatgaagaaacatcgcttatacagggtatcgcatattttgccttaagttcaaaactgtcaaacctataaatcctcaaagccccccctttaagttcaaatactatacatataatagaatcacaacgaaaagcacgtcataactgtactgtttattctgtacagtaggtattaaactattaaataagtataaaattaaacgaaagccaagcaataatgtagactgaccccaattagtgggaattatataaaaacattttcgttgaattcatattaaaatgaatcatacggaggtgtttttttctatgaaaagagtttcttattcagtagaaacaaagtataaagcagttgaaatgaaagcagcaggattttcaaaaaaagaaattatgaaagaattaaatattagaaatagaacacaagtgaaaacttggtggcgatggtatcgaaatggggaaagttatagatttttacaacatgttggtaaacaatatacctacggttatcgtaagattacagcattgattaatcaatgttatacatcaccaattaatcataagagagtacagagaataatgcagaagcatcatttaaactgccgagttagacctaaaaagacgacaagaataggtaaaccgtattataaaacggacaatttattacaaagacaatttaaagcgagttgtccaatggaagtattaacaaccgatattacttatttaccatttggtcattctatgttgtatttatcttcgataatggatatttataacggagaaattgtggcgtataaaatagatgataaacaagaccaaagtttagttaatgatacattaaatcaaatcgatatacctgagagttgtatattacatagtgatcaaggcagcgtttatacatcttatgcttattatcaattgtgcgaagaaaaaggcattatcagaagtatgtcccgaaagggaacacctgccgataacgccccgatagaaagtttccattcctcgctaaagtctgaaactttttacatcaataatgagcttaatcgctctaatcatattgtaatagatattgtcgaaaagtacattaaaaactataataataatcgaattcaacaaaaactaggctacttatcctctgtaaaatacagagaattaatagcctagaacatggtgtttttattaagttcccgttttaagggttcagtgccctaggattataggctcttttgtttataaaggtaattgaactaaagtattataatttcaattcttaattaatgttcctattttaccgtctaaagcgtcccctaatcctgctagagatgtaatcaaaacactgcctttagtatttttttcaagaaattgaagtgcagcttcaacttttgggagcatacttcctttagcaaattgaccatcagagatatgttttttcatttcatccacagacacttcatcgagacctctttggttttcttttccatagttaatgtaaacatggtccacagcagttaatatgattaattgatcagattgtaaatgtgctgctaataaagcactcgttttatctttatcaataactgcatcaacacctgtataaacttcattttccttaattactggaattccaccaccgccggcagcgataactagtgttccatgagtgattaatgtttctatactatctaactcaactatacttataggttgtggggaagggacaacgcgacgatagccgcgtccagaatcttctacaaaagtataacctttttctttcgtaaatttatcagcctgctcttttgtataaaataatccaattggtttagtagggttattgaaagcagaatcatcgcttgcaacttgaacttgtgttactagcgtaacaacttctttatctatgcccattgaatgaagttcgttttgtaaactttcttgcatctgatagccaatataagcttgactcatagcaccacattcagggaaaggaaaaggaggaccttgtttgtgttccgccgcataatttaaacctaagttaatacttccaacttgtggaccattaccatgactaattacaatttcgtatcctttatcgattaaacttactagagatttagatgtactttttaataaatctaattgttctttaggcgattgtcctaaagcgttaccacccaaagctacgacgattttagacatatttatatcctcctttcatttactctcctaatgttgctaccatgactgcttttattgtatgtgctctattttctgcttcttggaaaacaactgattgttcactttcaaatacttcatttgttacttccatttcagttagaccatatttttcttgaatttgtttaccgattattgtttcagtatcatggaatgatggtaagcaatgttcaaaaattgtatgtggattacctgtttttttcattaattctttagttacacggtatggttctaataatttgatacgtttttcccaaacttcatcaggttcacccatagatacccaaacatctgtgtaaattacatcagatcctttgacaccttcatcaatatcgtcagttataaggatttcaccaccgtttttgtcagctatatcattacaacgatttaataattcatcagttggatttagttctttaggacatacaagatggaaagtcatgcccatgattgctgctccttgcattaaggcatttgcaacgttattacgtccatctccaacatatgtgaagttaatttcattatatggttttttcaatacttctttagctgttaaaaaatcagcaagtacttgtgtaggatgatcttcatctgttaaaccattccatacgggaacgccagaatattttgccaaatcctcaactactctttgtgagaatccacgatattctatgccatcatacattccacctaaaacacgagcagtatctttggtagactcttttttacccatttgagaacctgttggcccaaggtatgttacatgtgcaccttgatcataagccgctgtttcaaatgcacatcgagtgcgtgttgaatctttttcaaaaagtagagcgatatttttacctttcattttttgttgttctattcctgcatattttgcgcgtttaagatcttcagataaattaagtaaaaattccatttctttttgtgtgaagtctaacaaagttaaaaagtttctatttcttaaatttttcattttgaatatctccttttcaattaatattttattcatgttatttttttataatccaatttcttttatcttgatatataatattttctatttttaattctctgattatttcaccagtagtttttctgttaagtccagataaattacttattaattgaacagtcataatttgttttaattcatagaattctccattatcatccccaattgaaaggcataaaatttgtagtattctttcaattctttctttagctgaattagctcttaacgccataatatattctacttgaaattgaatagtctcattaagtttcttgaagagactttcaaatatttcattatgctttctacataaatactcaagtaaatctttcggtaaagttaatattttacaatctgtcaaagctgtacatatttcatatggtgcaggggtttcattaaatatgaagttcattggaaatatattttcgtctttacttaatcttaaataattgtcaccagtaatattagaagattcatgtaaaatacaaccatttactaaaaagtatacaaattttatttgatcagttgaatgatatatgacttgtccttttttatattgataaagtgttaaatcctctttataaggtctaacaatactaacaggaatatttaagtatgatgctaattgtttaagattattatcaaattcatattctgaatttttaatataaatattttcttcatacataactataaaccccttaaaaattacttagtttaaatcataacttaaaatacagaaatattacctgtaatcaaacgaactattcctattattgcaagtacaatgatgaatatgaataacgtataatccaattttgtcaaatgtttgttattatccctttgtacgtagctgtatacgagtaatccaggtatatataacaacatcgttaatagtaaataatctaatccagctgcataaaccaaccaaattgtgtaaatagatgcaataattcctattatccattgttttaaattagctttagatttattttgaatagtatatttaacctggtaaaaagcactgagtgtatatggaattaagattgcacttgatgcaagtgaaaacgcaaactgataggcactatctgtaaacaacatactaattaaaaataactgaactaatatattagtaataattaaagcgttgaccggagctttattcttattttctttagcaaaccatttcgggaaaagtccatctttagctacaatgaatggtaattcaccagctagtaatgtccatcctaaccaagctcctaaaacagagataattaagcctatattaactaacactgaaccccaatgacctacaatatgttctaatacttgtgccattgatggattagcaagttttgaaatttggttctgctgaatgacaccttgggctagtacagtcattaagaaataaatgactagcacagaaatcaaaccaataacggtagcagttcctacatcttttttagactttgcacgtccagaaaagacaacggctccttcaatccctgtgaatacccatacagttactaacatagtactttttacttgtgccattgtatctccccaactaaaaacgccaacacttccactagtcataccataaaaaccggatttaaaagtactgaagttgaatacaactatcatgcatataataactagaaatataggtattaatttagctactgtaacaatactatttataaacgctgcagtttctacacctctaagtattaaaaaatgtacaccccataataaaattgatgctatgataatacttggaagtgtgttacctcctttaaatatagggaaaaagttacccacagctgacattaatagggttgcataagccacattacctagaaatgctgcaaaccaatatccccaagcacttgaaaaaccaataaaatctccaaaccctgtttgagcataactataaattcctccatcaagatctggtcgctcatttgttaaattttgaaatacgaaagcaagagaaatcataccaatagcagttattatccaaccgataattattgcaagtccaccagcttggccacccatatctgagatgatattgaatgcaccaccgcctatcatagagcctatgactaaaccaattaaggaagttttacctaatttattttcatccatattaatctcccctaataaaggtggtaaaaatcttgttatttgatttaatgaatgaattacttgtgacttttaccacctttcaaatttaaatatcttctctaaataacggctgactcatacatcttgggcctccgcgtccacgtacaagttcactaccagtaatttcaatcactttaattcctttgtcgcgtaaaagttggtttgatacatagttgcgatcgtatgtcaccacaacccctggtcgaatacataatgtgtttgagccatcattccattgttcacgtgcaccatcaataacgtcgccattacctgttggaataaagtccactttttctacttctaaaacttcagcaagtgtttcacgtaacttgctagaacgagtaatttttatatcgtccttaccatcattttgttctatggtaaatatattcatattattttcttctttaaatattgctgcatgtactgtaaacttatcgtagtcaatcatagttagtactgtatctaggtgcataaatgtacgtgtattaggtatttcaatagctacgatttttttaaaacttgtgtttgcatctttgaaaatattacgtgctaacttttctattgcttgagctgatgtacgttctgatataccaatagctaaaacatctttcgataatactaattcatctccaccttcaatattaaatggtgagttacgatctaaccatactggtacatctttatctttaaatcttggatgatgtttcagtatatatgtcataaaaatagattctctacgtcgtgctctccaatacattctgttaattgtcattcctctaccaattgaagcttggggatctcttgtaaaataaaggttgggcattggatctaagtaaaatggatatctatcatccatatattctactaaatgagttgtttcaagttgaatttcttctttacgtacgccagccatgattttatttacaagttcttggtcagataactttgaaaagaattctttaatttcagtttcatgacctaatattgtctttttagattctgttaatatatcgtttatgaagttctcgcgtacttctggctcagtaatagattctgctgcaagtttttctaaataaactacttcgattccttcatctctcaaagtttgagcaaatttgtcatgctcttcttgtgcaacttttaagtagggaatatcatcgaataataaaccacttaaatgatcaggtactaaattttctaattcttttcctggtctttttaacaacacagttttcaatttgcctatttcactatttacttgaatgggtccttgtaccatttcaaattcctcctttgctttattacattcacattataaaacgctttcaaaaaacatcgtgtgatttaattcacaattgtttagggagggttttcacatatatagatttattcaatgcaaaattttgtatgaatatgtattttgtactatataatagtgaataatttgaaaaatctcattgttaaaaccttatcttattcaaacaaaaagattttttactcatttttttgtattagtaatcattcctattaatataatcatttaatttttaagggaataattgataacaaacaaattctgctatttcatttgaagaagtcaaaatcatcaaagtatcgttacctccaatagttcctaatatttctttcatttgtaattgatctatgtaataacttatactttgagcaaagccaggagatgtttttattaagacatagttatttagcgttataaattcaataatctcatcactaaatatttctaattgtttttttgcacttaattgatttgtttgatttattttcttgtaaatatactttttattttcaacagggattttgtaaatttctaattcttgtaagtcacgagaaatagttgtcaagctatagtaaactccaaaatgtcttgccatgtaatccactatttgttgttttttattaaactgattctgttgtataacagttaagataagatttaaacgtttttcttttttcatttttattaacccctttattatttttgattatgaaatagattttaaataactgtataaaaatcacttataaatatcaatttacaaataattttgaaatagtggatgctttaattataagtagattattttacgcttaaaaggagagattaattagaatagattatagttatcataattataaaatcaaaattttaagtaacattaatgaaatataataaaaataatttgcgtaataatagcgaaatgtgtaaattgtaaatgtcaggtaataacaaaacatgttaggtgagaatgtcttacagttacatttactatgtataaataaaataataacattaatagtgagagttaggtaataaccacaatatctcataaaagaagtttggaaaaaggcattgaaataaaaagtagtttataagttgaagatatttaggtatgtattagagcgctttataaataaataggtttatacatagaattacaaaaataatataaaaaatagaatctaatacatgataaagaaagggttaaaataatctagttcaacttttggattagtggttgtattttaacttgatacagactattctattttttttctaaataatgtgattcaagatatgctatatcatcttgattaatctaaatttaattcagagaaaaagtctgaacgttattataattatacgatttcaaatacgatggattatgtgattagtttaggtgaagatgaacgtcaacgttttattaaaacggtcacagaatgaggaaaagcctttgcgctttgtgatacagaaccgaaagcgcaaaagctcaatgatgaaattgtcttctttaaagccgttaaagcaggacttgttaaattgttacaaccatcaaaagaaggaaaaatatataagacacttgctaaagttgaagcagagattaatcatcttgtgtcacaatctgtggttacggaagaggtaaagaattagggttaaattctgacaaaattgatttttacgatactttaatctcacatgaaacagaaaaagaagttataggtgataaaaatcttagagcaattgcccatgaattaacaaaaattgtgaaagaaaatatgactgtagattgtgataagaaatcaagtagtagagttaataagaggagatcagtaaaaagattattgaagaaatacggatatccatctgacttagaaacaatagcaatcaatcaagtggttgaacaagcagagatgatggctagtaatcagtaagaaaaactaataaaacatactaagattagctatgaaaaaatctatcgtcatagatttcttcatagctaatcttagtatgtttttagaaaagaaaattagtgaaaaaactttacttatcatttattagttcggtgtgctcatatcacatcataatataagctattatgccgagaaaattttaataaaaaaataaaaaaaacctaaatactctctcgatttgtgagaaagtatttaggctttttgaattaataaatttcttacttcttatgtttatttaacaattagtactgggacagaacttcttttagcaatcttatgtgtaacatctcctaaaacatgtttaatattcaaatcgactctatgattactcataattactaaatcaaattcaccattatttatatctccagaagtaattttttctaagattgtatctttaatatgcccaaaatctacatctattttatattgaatatctcttttttctaattcacgtaaaaatggagtgagttttttttctttttctctaataatatcttctttatgcttattataatatttgacactaattgcaagatcattttctgttacaacgtgataaattacaacaactgaatcttcatcgatgactttttctaaatagtcagggatagcactaaaatcattttcgaaatcatagggtaataatatatttttgaacatctacaccagcctcctattacttatataccctgaatatatatgcttattctgattctgttgcaaagtaaaaaatatagctaaccactatttgaaattttaagatatttttttagagcatttagagatatttatagaataataaacaggttaaaaagtaataggattaataggatttggataaaaaaatcaatcctatttataggattgacgtcgactaaagcctatgaaatcaacaaaaataatagtattcagacaatttaaagtggtcttgtaacaattgtaaatagtatgcaatattagaggttatagtatcgatcaattcttatttaatattaactataagtattgttatatcagcgtttataataattttaaaaagagcatgtaatcaaggcgagcataagataatccttcagctatgctgaataccacttaaggtggtactggatttccttatgctcatgcaaaatcctattttgtttgtaatatttcaaaaagtaaaacatacattgttaaaaaataggttattcttttcttcactttttactttaatttcttatttttatttccaaaatagtcattgttaataaaaattatagtacccttatttgcaattttgagatactttttagagcatttaggggtgttttatatattatttatttaatggctcttaaaagacaaatatgaactaaatttaaaaatcagaaagacaaaacaaaattttttgcttaaccagtgtcgaattttttagacactgcccatctatatgcaaattaaaaattggcataaaatagcttaaaaatttatcaactttttagttcctgcaggggcaatttctttcaaaaaaacgctagctttttgctaacgtttaagaaaatttatttttcttcttcaatttcatcaatcatttgatgattgatttcttgttcttcactttctgttaaatcaaaaatttcactcgctaaatactcttttttattccaagtataaaaaatttgataaatatattcggtcggatcaacttcttttaagtaatctaattctccattttttaatttctttcttgcgtctttaaatagtccaaaataaacaagaacttgttttccttttaacgctttataaaatgcatcgaacactttttgattaattaaatagtcgttatccggttctgttgcaaagttgaatttatagtataattttaacaaaaaggagtcttctgtatgaactatttcagatataaacaatttaacaaggatgttatcactgtagacgttagctactatctaagatatgcattgagttatcgtgatatatctgaaatattaagggaacgtggtgtaaacgttcatcatttaacggtctaccgttgggttcaagaatatgccccaattttatatcaaatttggaagaaaaagtatcaaaaagcttattacaaatggcatattgatgagacgtacatcaaaataaaaggaaaatggagctatttatatcgtgccattgatgcagagggacatacattagatatttggttgcgtaagcaacgagataatcattcagcatatgcgtttatcaaacgtctcattaaacaatttggtaaacctcaaaaggtagttacagatcaggcaccttcaacgaaggtagcaatggctaaagtaattaaagtttttaaacttaaacctgactgtcattgtacatcgaaatatctgaataacctcattgagcaagatcaccgtcatattaaagtaagaaagacaagatatcaaagtatcaatacggcaaagaatactttaaaaggtattgaatgtatttatgctctatataaaaagaaccgcaggtctcttcagatctacggattttcgtcatgccacgaaattagcatcatgctagcaagttaagcgaacactgacatgataaattagtggttagctatatttttttactttgcaacagaaccttattacttatataggtgagagtatgataagtgagaatgtaccatttaaataagttgttaaatatgagcattagcgattattaaaaaagtagaattatgtttagggaatttttagcaatatcattgataaggggaagcgtatcacaaataaaactaaaaaataagttgtatataacttattttgaaattggttaagtatatagtatctccaataaaatgtagttaacttacgataatgctgaactatagctttgtaaactaaaatgtaaataattacaatcaaattgcaacaatatagttcaagaatgctacaatttgaggacagattgatagcattaatccctttaaaatgaagctaggagataacttacattatgattagtaaacaaataaaggatttacgaaagcaacataattatactcaagaagagctagctgaaaaattaaatacttcaagacaaacaatttctaaatgggaacaaggtatttcagaaccagacttaattatgcttatgcaattgtcacaattattttctgttagtacagactatctcattacaggaagtgacaatattattaaaaaagataataaaagctattatgaaatgaatttttgggcatttatgtctgaaaaatggtgggtaattattattatagtaatcataatttgtggaacaataggacaaattttttcaaactaatgtaagtatctctcaaatattttgggaggttttattatgaaaatcaaaaaattattaaagacattattaattattttattatgttttgtattgtctgttattgtgcaaaatatttcaatgctatggcatattgtgagcatttggagtgttgaatatattttacatgcattaacttatatagtactttcatacttttcagtaaaatggttcattgaaattgtgcttaaaagcaatatgaaagattatagaataataccggtgaaatttttcaagtcttgttttcttataggattaattttgatattagtaattgatttaatatatctattatttattcctggtaaattgataatacctcattattcaacaagcgttggatttatggagatgttctttagcgcatttttaattactggtattgctgcgcctatatttgaagagatggtatttcgaggaatactaatgagatactttgaaaaacaatatggaattttatttggaattataataccctcgattttattttctcttgttcatctatttaatggagagttaaagggagaaaatttattattactacttataggtggctcaattgctggaataatgtatgcagtgactgcatggacgtttaatagtatatgggcctctgctatattacatatgctttggaatataaatggtttattaaatatcacaactcaagatgatcattggggagtatatcagtacatattagaaacaaaaaatgtactgattacaggtggggattatggtatggatacatcattactttcaatatgtagttatattgcagttattatagttatgattgttactaaaagacactttaactttttactaaagtaattatagaatagtgtggttaatcctgacgactagtcggatacaatttaaagagtaataaaaagtgtattattaactgatatgcaaaagtatcccactaaagaaataaaaaaacagatggtagaatatgttagcatttaatatacaaattagtttttaacttacatgaaaactagttcaataaaaaagttaaattaggagcttattatgaatatctatcaaacctatgcatgcttagtcataggaataatcgttaatagtactactactatactaaaaagaaaaaaattaatttcaaatattaaacaactttggaaaagtaaaaagactttagaagaatttatacgttcaaattcgagatttgattattagtttaatcttcgacgtaagaattattctgatacattagtagatgataaaacatggatagacttagatatggatactttgcttcataaaattaattttaactatacagttatcggagaaatgaactccctataatctaattgagaaaatataagaagaaaaaatttaaggttttagagtcccatgtattattccgttctttcttgatagatgtgtaatattttagtggatttaataattagtaaatttttaacaggcataataacttacaattaagaaaagattaaaacttattaataatagagaggttatgtgaataatgaatgatttgttaaaaatttatgaaaaattgaaaaaagatattgaaaacaggtggttaataccatttcattatgtggtttttggattagcattagttgtatattttctggaaattcctatttataaattggtgaataacttagataaagagcttgttgataaggttttatatgctttttcattagtgtatgatcacattgtattgatatttatattaattataattatcattttgatagtttatttattctttgatgtgtttaatatgaatcgttttgttccatcgcctacaacttatgtagatggtagtgaaagttctataaactatgtaagtgctattaaaagattgataaactttatgatattaattatcacaaagtactggataacttactttattgtaaacttaatatttcataatgataaattactgtatttaaacaatgattcaaaacatttgtataagtgtctcttgtttttaaatatctgtatctttatagtgcatatattaaaatcaatttttataataaaaattatggcagatgattcgctaagacttattaatgaaaatgatttaactgatttttacataacattaaataaaaatgatgaatatcgtatggtaaaacctaaatatagaaaaatagataattttattattattaaaaaaagtgaagatttcactaattcaaatgagtataaagttattaataaaagtaaaaattttgaggaaataatttatcattttgacaatcttacttcaaatcattgatgatttataaattattattctaagtttaactagaaattaaatttttatgcaggccaatcgatttctttatcgattaataaaaatggttatattaataacagttttgatgcttcgcgagatgtcattagaaacatcgaagtaagcatcttagactataaataaagtcattgtttataaaaacaattgcattaaaaaagggagtatagaactcccttaataagttgatatataagtcacttatttttttaataaaattttaattcctctgataatgttgagaatatataatattaaagcaattaaaaagaatacaatagcaatgattaaagcaataacaaatattaataattgatgatcaaacggtttatcaaagactccttttgaaaaaataaaaattcctctgcctacacaaaaactaatccatgtcataatatgattccctaatgcttttttaccatgtcctgatgttggctcatcagcaagtatccatacaaataaaggtaaaatgacaggtgcgaaaaagatacttaaataactcaatgctgataaaacgtaactattgtcatttttatgcatattactatttgtattttccacttttttcaccttctttacttttctttattattataaaaacattaatagcgagctattacaacagttataagagaaacttacaataatgaaagtattccactagaccttcaaatcttactttggcacatggtagaagaaaaagataaccagcctcaaaagctttatcacttattattgataattttgactgcatcattaataatattttttgttaattgagctgcatcgactgtgtcagctaatctagtactttgtccactccaaatatgggtccactcagtatatcctttctccaaagcagattttcgtatttgcgttgttaattgattttgtaaaggataaggaggcacctgttttgaatataaattcatattgtgtacaaattcattcataattccgcgagccaatttgccactaaatacatttgtcagtattgtatctgtttcagagctttcaataatttcatttttgattttgtcatcagcgccactttcattcgttgttaaataagcagtacctaattgcgctgctccagcccccaaagctaaactagctactaaacctcttccatccataataccaccagctgcaataactggtatagacacattatcaacaatttgtggtactaaagataaagtaccgaccaatggaaattcaccattgattgttgtaaatgatcctctgtggccacctgcttcatagccctgggctacaactatatccataccagcattttcattttcaactgcttcttcgactgatgttgcagttccaattaaaatttttcctgcattatgaagtcgtttaataatattttgatttggaataccaaaagtaaaagcaatgataggtacttttaatgattcaataacttctattgcatcttcaaacttttctttttctttagccgtactatttttgggagtagataatccaagcgcttctctatatggtttgagttttgtattcatctgctcaatttgttttttatcgtacttaatatcattgggtgtaaatagatttactgcaaaaggagcttgtgtcagtttttgaacttctaaaatctctttcgaaagttgatgtgaatcaaaataacctgctcctatcatacctaagcctccttgtttactaacagtagaaactagttctggcgtagtacttcctgccattccagcttgtataataggatatttaatacctaacatttttgtgatttgagtagttaaattcataattaacaccttctattttattatatttgatttcattttctcaaaagcaacttgtttcaattgatttatcacattattatttttattatcttgtcgataaatgatatttagtgatattgtttgaaatgattcctctactttggttatttctataccatcgctatttcctttatttaatactgacataggtaaaaatgctatacctaatccagcttcaacacaccccaaaatgccatctaaagtatttaatgtcattttattttctatattaatatcatgataattaagccaatcttcaaaaatttttctataaaaacaaccttcgccaaacattataatagacttattttcgtttatattctgtttaaagttgctcttttgagataaaatcactaatttttcattaaagatatttgtgcaaataagatctttatcgttaatattcccagatataaaagcacaatccatttctctattctttacatgttcaattaatttaatactattatctgtttttaaattaatttgaatttttggatttttcctcttatattcattcaataatttaggtaaatgaactgcagctattgtttcaattgtccctatgttaatatttaattttttggttctgttgcaaagtaaaaaaatatagctaaccactaatttatcatgtcagtgttcgcttaacttgctagcatgatgctaatttcgtggcatggcgaaaatccgtagatctgaagagacctgcggttctttttatatagagcgtaaatacattcaataccttttaaagtattctttgctgtattgatactttgataccttgtctttcttactttaatatgacggtgatcttgctcaatgaggttattcagatatttcgatgtacaatgacagtcaggtttaagtttaaaagctttaattactttagccattgctaccttcgttgaaggtgcctgatctgtaattaccttttgaggtttaccaaattgtttaatgagacgtttgataaacgcatatgctgaatgattatctcgttgcttacgcaaccaaatatctaatgtatgtccctctgcatcaatggcacgatataaatagctccattttccttttattttgatgtacgtctcatcaatacgccatttgtaataagcttttttatgctttttcttccaaatttgatacaaaattggggcatattcttgaacccaacggtagaccgttgaatgatgaacgtttacaccacgttcccttaatatttcagatatatcacgataactcaatgtatatcttagatagtagccaacggctacagtgataacatccttgttaaattgtttatatctgaaatagttcatacagaagactcctttttgttaaaattatactataaattcaactttgcaacagaaccgtattatggaatagagatgttggtaacatttatacaggatcattatacttaagtttaatttcgttattacagaaccacacattccaaccagaagagaaagtatgtctatttagttatggttcaggagcagtaggagaaatctttagtggttcaatcgttaaaggatatgacaaagcattagataaagagaaacacttaaatatgctagaatctagagagcaattatcagtcgaagaatacgaaacattctttaacagatttgataatcaagaatttgatttcgaacgtgaattgacacaagatccatattcaaaagtatacttatacagtatagaagaccatatcagaacatataagatagagaaataaactagtggccgattgtgcttgatgagcttgggacataaatcctaactcgaaataaataagcatatcactaaactgattttttaaagtttacagtgatatgcttatttttttatcttacgattttgtacgtgcatgcttgcctaggggtatggctcgagccattagtctctcgcacatactattccctcaggcgtcagcacttacaaaatcggttgtaattttcatttttatacgcattcttactgagattatactaataagaggaatagtaaaagcaattctaagtaaaattgcagataagaggtttgttaaaagcagttctaagtaaaattgcagataagaggtttgttaaaagcagttctcagtaaaattacagataagaggtacgttaaaagcagttctaagtaaaattgcagataagaggtttgttaaaagcagttctaagtaaaattgcagataagaggtacgttaaaagcaattccatgcaaaattgctgataaggggtaagttaaaagcagttctcagtaaaattgcagataagaggtacgttaaaagcagttctaggcaaaattgcagataagaggtgcgttaaaagcagttctcagtaaaattgctgataaggggtaagttaaaagcaatcctaagtaaaattgcagataaggggtacagaaaaactagacttgattacaaaatggagcttgggacataaatgattttttaaaaatgagatgagacgtagattaactccataatcaatacgaatctatcgacttctttatttatgatattcatctctttttaatggaaataaaagtgcgattaatgtgataatacagttacgttaattaaaaaaataaaaatgcaaggagaggtaatatgctaactgtatatggacatagaggattacctagtaaagctccggaaaatacaattgcatcatttaaagctgcttcagaagtagaaggtataaactggttggagttagatgttgcaattacaaaagatgaacaactgattatcattcatgatgattatttagaacggactacaaatatgtccggggaaataactgaattgaattatgatgaaattaaagatgcttctgcaggatcttggtttggtgaaaaattcaaagatgaacatttgccaactttcgatgatgtagtaaaaatagcaaatgaatataatatgaatttaaatgtagaattaaaaggtattactggaccgaatggactagcactttctaaaagtatggttaagcaagtggaagaacaattaacaaacttaaatcagaatcaagaagtgctcatttcaagctttaatgttgtgcttgttaaacttgcagaagaaatcatgccacaatataacagagcagttatattccatacaacttcgtttcgtgaagactggagaacacttttagattactgtaatgctaaaatagtaaacactgaagatgccaaacttactaaagcaaaagtaaaaatggtaaaagaagcgggttatgaattgaacgtatggactgtaaacaaaccagcacgtgcaaaccaacttgctaattggggagttgatggtatctttacagacaatgcagataaaatggtgcatttgtctcaatagaaagttagaggtgagtcttacgtttcagtgacggtagacttacctttaacatgttacatactaaaaaattaatttgaataagaaagagagacatatatgaaatacgatgattttatagtaggagaaacattcaaaacaaaaagccttcatattacagaagaagaaattatccaatttgcaacaacttttgatcctcaatatatgcatatagataaagaaaaagcagaacaaagtagatttaaaggtatcattgcatctggcatgcatacactttcaatatcatttaaattatgggtagaagaaggtaaatacggagaagaagttgtagcaggaacacaaatgaataacgttaaatttattaaacctgtatacccaggtaatacattgtacgttatcgctgaaattacaaataagaaatccataaaaaaagaaaatggactcgttacagtgtcactttcaacatacaatgaaaatgaagaaattgtatttaagggagaagtaacagcacttattaataattcataataaaacagtgaagcaaccatcgttacggattgcttcactgttttgttattcatctatatcgtattttttattaccgttctcatatagctcatcatacactttacctgagattttggcattgtagctagccattcctttatcttgtacatctttaacattaatagccatcatcatgtttggattatctttatcatatgatataaaccacccaatttgtctgccagtttctccttgtttcattttgagttctgcagtaccggatttgccaattaagtttgcataagatctataaatatcttctttatgtgttttatttacgacttgttgcataccatcagttaatagattgatattttctttggaaataatatttttcttccaaactttgtttttcgtgtcttttaataagtgaggtgcgttaatattgccattattttctaatgcgctatagattgaaaggatctgtactgggttaatcagtatttcaccttgtccgtaacctgaatcagctaataatatttcattatctaaatttttgtttgaaatttgagcattataaaatggataatcacttggtatatcttcaccaacacctagttttttcatgcctttttcaaatttcttactgcctaattcgagtgctactctagcaaagaaaatgttatctgatgattctattgcttgttttaagtcgatattaccatttaccacttcatatcttgtaacgttgtaaccaccccaagatttatctttttgccaacctttaccatcgattttataacttgttttatcgtctaatgttttgttatttaacccaatcattgctgttaatattttttgagttgaacctggtgaagttgtaatctggaacttgttgagcagaggttcttttttatcttcggttaatttattatattcttcgttactcatgccatacataaatggatagacgtcatatgaaggtgtgcttacaagtgctaataattcacctgtttgagggtggatagcagtacctgagccataatcatttttcatgttgttataaatactcttttgaactttagcatcaatagttagttgaatatctttgccatcttttttctttttctctattaatgtatgtgcgattgtattgctattatcgtcaacgattgtgacacgatagccatcttcatgttggagctttttatcgtaaagtttttcgagtccctttttaccaataactgcatcatctttatagcctttatattctttttgttttaattcttcagagttaatgggaccaacataacctaatagatgtgaagtcgcttttcctagaggatagttacgactttctgtttcattagttgtaagatgaaatttttttgcgaaatcacttaaatattcatccatttttttaacggttttaagtggaacgaaggtatcatcttgtacccaattttgatccatttgttgtttgatatagtcttcagaaatacttagttctttagcgattgctttataatcttttttagatacattctttggaacgatgcctatctcatatgctgttcctgtattggccaattccacattgtttcggtctaaaattttaccacgttctgattttaaattttcaatatgtatgctttggtctttctgcattcctggaataatgacgctatgatcccaatctaacttccacataccatcttctttaacaaaattaaattgaacgttgcgatcaatgttaccgtagtttgttttaattttatattgagcatctactcgttttttatttttagatactttttttattttacgatcctgaatgtttatatctttaacgcctaaactattatatatttttatcggacgttcagtcatttctacttcaccattatcgcttttagaaatataactgctatctttataaacttgtttgaaatttttatcttcaattgcatcaatagtattattaatttctttatcttttgaagcataaaaatatataccaaacccgacaactacaactattaaaataagtggaacaatttttatctttttcatcaatatactccttatataagactacatttgtagtatattacaaatgtagtatttatgtcaaaataatgttataatttttgtgatatggaggtgtagaaggtgttatcatcttttttaatgttaagtataatcagttcattgctcacgatatgtgtaatttttttagtgagaatgctctatataaaatatactcaaaatattatgtcacataagatttggttattagtgctcgtctccacgttaattccattaataccattttacaaaatatcgaattttacattttcaaaagatatgatgaatcgaaatgtatctgacacgacttcttcggttagtcatatgttagatggtcaacaatcatctgttacgaaagacttagcaattaatgttaatcagtttgagacctcaaatataacgtatatgattcttttgatatgggtatttggtagtttgttgtgcttattttatatgattaaggcattccgacaaattgatgttattaaaagttcgtcattggaatcgtcatatcttaatgaacgacttaaagtatgtcaaagtaagatgcagttctacaaaaagcatataacaattagttatagttcaaacattgataatccgatggtatttggtttagtgaaatcccaaattgtactaccaactgtcgtagtcgaaaccatgaatgacaaagaaattgaatatattattctacatgaactatcacatgtgaaaagtcatgacttaatattcaaccagctttatgttgtttttaaaatgatattctggtttaatcctgcactatatataagtaaaacaatgatggacaatgactgtgaaaaagtatgtgatagaaacgttttaaaaattttgaatcgccatgaacatatacgttatggtgaatcgatattaaaatgctctattttaaaatctcagcacataaataatgtggcagcacaatatttactaggttttaattcaaatattaaagaacgtgttaagtatattgcactttatgattcaatgcctaaacctaatcgaaacaagcgtattgttgcgtatattgtatgtagtatatcgagcttcacatgaaacagctaaagaagctttgggcgataaagagttaagagccattgcacatgagttaactaaaacagttaaggataacatgagtgttgattggtctaaacgagacagtgctaaagctaaaatgagagttcaagttagacgcctattaaagaaatatggctatccaccagatcttcaaaaaatggctgtggaacaagttgtagagcaagcagaattaatggcaagtcagcaataaaaaaataaatcataatgagtccgggacataaagttcttggataagtgaaaaaagacaatttctattgaaataatatagaaattgtcttttttataaattttttgattattttcagctcgttgagctactacttttcttatattaagtgccattaatacaaaaccaagttctcttttgactttattgagtcctcggacagacatccgagtgaaacccaaaatagccttcataaatccaaaaacaggttccacatcaatttttctttgactgtagatattttttgtttctggttctgaaagctttttgttaatttgggatttaaaatattcccagttataattcttcattatttttttgtttgtttttgaattgaagttcatacattgatttttcagaggacattctgaacaatcatcacattcatataatttgaagtctcgcttataaccatacttatcatgacgataggcatatcttttaaaacctagccgtttattattcggacaaatgaattcgtcattaatttcgtcatagttccaattttgagtattaaagatgtcacttttatattttttagttttatcttttataaacattccatatgttatgagtggcgttcgattaaagtcatctataattgccttataatttgattcactaccataacctgcatcagctacaatatattcaggtaaatgaccgtaggtctcttgaattgaatttaaaaatggaatcatcgttctagtatccgttggattttgatacacattataagataaaacaaattgggaatttgttgctatttgtaaattataccctggcttaagttgtccatttttcatgtgatcttctttcattctcataaatgtcgcatcataatctgtcttagaataactatttctatcctttaaaatagatttttgaaattcgtatcgatactttcgctcaaaataatcattgatttgctttttgtattttttgattttagttcttttgagacgtatttgttttcttgttttagtacatttttcattgttgatatgttggtttaaatcttcgatttctttatctaagtgactaccaatcaaatctatttcttcttttgttaattcattatcatgatcttctttaatttccggtatgattttattggttaccaattcatggtagagggctttagaatcctcattcatctttgattcatggttttgaatactctttttccatacaaatgtatatcgattggcatttgcttcaatttttgtaccatcaataaaaatagctttatcatctataagattttgttttacacactgactgtaaaattgaataaataaagattctaataaagcatctacttttggatttactctaaattgattaattgttttataagaaggtttttgattttgtgatagccacatcattcggatgctatcattaagcattttttctattttacgacctgagaatacagattgtgtgtaggcatatagaatcacttttaacatcattttaggatggtacgaagttgcaccacggtgatgtctgaattcgtcgaattcattgtcaggaattgtttcaacaatatcatttacagtaaaacgatgttgatttgttttgtttccatattgacctccatgtatttgctatgatttcaaaatccatttttgacgtgccttagggttgagtggatgcataatttcatttgttactggattgatgagcttttttactttctttttatgaggttttaacatttccatcacttgttcgacacggtcgataacaactggtcgcttcgcataggcaccataagcaagaatcactgtgtcactttcactaatcgctttcatcaaatgaatatcagtgtgctcatcgtatggatttttgatatgtttgaggttttcgggtgttctaatattagagaatagatttacaagatatacagcaccgtatcgttctgaattggctaattggttgaggataagaacagttgtgagatcgagtgataatacaccgtctaaatgaggatacatcgttatcactgtgcatgcagctttcttttcatcccatgttttcttgagtaaatagcggtgctgttcatcatcgctaaatatggcttctgtgtgtatcgtacttttgattgtattcatcatcgtcacttcctttagtattcttctggtaaaagcatcacataataaaaagcgtccacgtcatcttcacgaatgacgtagactttcttaggtaatgcattttgatttttttcatagtttgtatagtgatattccaatttgtatgtgggttgttcttgttcatgtgtgattgagagtatattctcatcttcttgtaatttaaaaatgtgtaggtaatctgtatgaggctggttatcttttttttctaccatgtgccaaagtaagatttgaaggtctagtggaatactttcattaattcctcttgtgatgtatcgattgattttcatgctatttccctcccttctgcttttctttcatgatgtcgatgatttcgttgataactgtgacggataattgagcaactatgatccaattattcatggtcctgacctccttgttttagtaaatgacgttcatcaataatgatattttgagtatctgtaaggtacagaaagtccatgtcaaaatggtctaagtatccgacactgatgagttggttattggcatacattagaaatggatagatacttagctcatgtagttcatcattatagtaggtataagtctcgagtgtgagatgtaccagtggagaatcattaataaaacgttccggtagaatattttctgctgcttcctccagcgcttcacattcccaagcttcgttattagatagttggaataggtgggttatatattgtttgagttcttgagtgatggttttcatattattgcctcctagatagtgtaatagtgatgtagttcatatacatcattgagataatatatatttgatttgtcatttattacgaatcccggtgggaataagagaaaattccatataaaaacccgctacaaacgttggtatgccaaggaaatcctgaaattccgcctattttgacaaacaatcaactcattatttataagtattgatgatagggttgtgtctctgcttccttatatatattatttatttataaaaagtaacgggattttgggattgtgcttgcacaatccttctgtttcttcgaatctgcaaatcccaatcatttcccgataaaaaatcattgtgggatgttctttagcaatttcaatataagcatcgtatagttatgaaaaaattacgacaataactgtttcattagataagtgttattgaaattgataaagagcaattcttgaaaatagttagataaaataagcgaaagaatatagtgaaaattattgttataacaatgattctattagctaaatagtaagatatagtgtttggggcaaaaataaagacgaagtgctgagatgcacttcgtcgagttgtttattattgaaaagttgtttaatgatttcgttattaagtttgagtgtgacatagaattgttttttatgattaccatcttttctaatattaatacgatcaatcactgataggtacaatgctttgagtcgagatttttccatgtgcttaatatcttgaaagatgtgttgtaatagtttactgatttgtttggcatcaaataaagacttatcttcattttgttgatttttgagttggttgatttgattcgtaatgtcattgagttgcttttcatatttttgaatacttggtctgattactgatgttaagtccggattatcctctatggttttaatcaagttatttagtttggtttgtacttcatcatattgttgttgcttataagcaatatcgtgatgaagtgcagcgccatcaactttattttcttgattaacacgtgctacaacgcgttgaatgactttatcacttttgactatttcgagtatttgcttcattacataatcttcaatcacatcagctcttacactgtttgccgaacatactttggaacccttgttccgaaaattactacatgaatagtaacgaatacgtttcttggtcccatctttaagtgtattcgttgtattgcttgctgccataggtgcgccacattggggacaatggataatgcctgtaagcagattcgttcctttaccatgaacttggggtttttgactgacttgttttttacgcatttgtactttatcccataaatcttgattaataatgggggaatgcttaccttcagctatcactggtttatcattcagccctttacgacgtttttcactccaatctttgtatttcgcaaattgaattttgccgatatagaatgggttagctaatatatatgtgatagaactaatactaaaaggtttaccctttttagtgacatagcctttgtgattcaatgcattggctattttacgatagccatgtcctttggcataggactcgaatatatattttacaatattagcttcatgttggttaatcattagctcgtgtttactatctggtattttgtcataacctagtggtaaattgccttgataatagccttcttgggcacgtctcgtttgccccataaatacattctcgacaatgttattacgttcgaattctgagaaactcgcaagtatttgtaacatgagtttaccagaagaagtattgacttccatacgctctgataaactgaaaaattcgacattttgtttatgcaaatcttcgacgattttcagaagatccgatgtattacgagctaatcggtttgttttgtagatcataacacaatctatattgccttcttttgcatctttcaacatacgttggagctcaggtctgttcatagatttacctgaaataccacgatcagcgtatatatctttaacttcaaaatgatggaagtcacagtattctttgatttgattgatttgtccgtcgatactataaccttctgtgctttgcatttctgttgatacacgtacatagataccgacacgttttgttttaagttgttgcattatgttacatcctttcttcatttatgcaatcgatgattgcatggcttgattgacgatattgagtggttcatttttgaaatagattcctataagatttttatctttcgtaatgtgaatggtttcaatataggggtacaatatgtttaacgtgaaacgtttttgaataatattttgaatggtgtgttgtatttgatgcccatttatagatgtagtgcgttgcggttgttgacgtaatgattgcgtttgttctctgaacgtttctgcatcaatgatgccttgtgccaacttttctatcagttgttcttgagtcaatatgtgatgtttttctatgtttctttgtcttttgatgcgtttgtcaatcgcacctttaatttttgtgtagatgcgttgattttgataaaagtctcggcacacttctaatactttatcttcaagtgtttgtgcattgatgcctttaaaatcacagacaaagcgtgaagcattcatgtttttaggacagacgtagtaacgtaatgtatgattcttttttctaatggtcatatttgtaagtgttgcattacaacatgggcatttgattttttgtttgagttgattatccgaagatgtctgtttggtttgtttttgcaatcgaagtctctgcgcttgctcatatatacttgtggaaacaatagaaggaaacatattgtcgaattgaccatattgattgttgacacgaccacaataattaggattgatgataatgttacgaacttgatagggttgtcgattgatatacgtgttatcttcttctaataactgtgcaattttcttataaccatgacctttaatgtaataattgaatacagcctttaccgttggtgactcattttgattgatgatgaatgttccgttgtgataatcgtaaccaaagggcgcatgggttgtaatcaatcgaccttgctttgctttttcttgaagcccatttctgacttgttctccaatgttatccgattcaagttcggctaaactgatgaagatattaagcttgagtcggtcgaaagcttgatccatatcaaagtaaccatcatgtacacttaagatatgaacacgatatgtttgacataatttgatgagttttaatgcatttttcaaattacgatgcaacctattaagacgataacagcataatatgtcacattgtccttgttgaattaattgtgtcatttgtcgatacccactacgattatctttgcgtcctgattgtttgtcgctataaaagttgatatgttgaatatgatgtttttcggctattgcttcgatagcttgtttctgtgctgcaagagattgttgtttcatcgtactttgacgtaaatagcctataacttgtttcatatcggctcctcctttcacagtgataatatatatttatagatgaattgatatataagcccaacatcaatgagatgttgggcgtccatattagtcattcgtttgattgatttcttcaattaccaaatcggctaatatctcgataagttcatccatgtttttcactccgttatttgttctatcttcaatacgtcgattattcagtttgatgcttcacggttgtatgataaagacaatcagaaatcttcgtgaactcctgaagggcctatcccctcattagcggatttaaaaagttctttcgcagctttgttatcatttgccggtgtccaattttgaattaacgacttatctttagttaatcccaggatagatgcaaactctacatctaattttagatggtaaaatacaagtgattgttttttaccgctattatctttgacacttcttttagttgtttggcgtccacggtcagctaatatgaaacctttatctcttaaggcgttgacaacattattaacatcttgaaattgatgattgtttagcatctgtttaaaaacgttcgcaatcatttttacttcgatatggtcatcttttaatgagattaatccatagttctcaaacatatttttcaaagcaccttcatctgaaaacttacctctgttttgtgccacaaattgaatgatgacatcaatagctttatcagctaatgagcgttcagagactgtatgagtatgataatcaataaagtagtctcttatattagcgatatcaatatctgtagataaaacacgacctaatattttcgcagatgttgtaatgactgcataacgcttaaacatacgaatacctgtattgtttgtttcatctttcaatttagcttcaaaccaatctacttccttgtaaaaccattgaataacttcatcttcacgatttataagatatttagctactaacggtaaaacatgaccatagtttagtgctacagcttttttaatattgtcagcattggtcgcatttgtagtgaattgttcattaatctcgatggttcttacacgtaatccatcgttttgagctgaatcattaaaaatactgtattctgacgttgaaatgacagaagtaccccaattcttaggcgttttaacttctccatgaacgtttgaacgttgacgaccttgaccttcagcgatggaatataacaaacccgtggtatctctaagtgtcgtagatgaaagctcatcaaatactataggaatgccataattgttactcaaataaccttcaagtgcgtttcgtgtggcattccaacttctaaaaagagtttcattacctttggtagggttaccagcgactgatacagctaaagcagctgcggttgacttaccggttgaggattgacctgtaaaactaaagagaattcctgcaaattcgatttcatgtttatgcttcagaaaacttgtcactaaggcagaaatcccaaatatgactgccaattctaaaagaagatgacctttaacctcgtcaatatacatgttaaaccaattatcaaatgtacctttaggagttaagtcataagcactatctacaatagggtatgaaggtgaggactgattaaattgaatagatttgagaactttatctagcgatatcaagtagccaaaaggtgtctctagtatacctacaccctcatataattcagaaagtggtaatctatctcgcatcaattgcaaggcataactcaatgatctaatatacttctcgttaatactgtagccatatttaattaaagaaggtaagtttcgtgttgttaagatatcagactcaaaaatgtcttttttaccattgttgttagtaataatcaacttttcaacaccagtaattggatcagaaaatcttgcattaacaataatagggctagccattctaaccactttttcactgtcaccatcttttttaggtggtatcgtttctttccaaccgaaggaatctaaagcaaatgggccaatttcaaacaatgtgtaactcattagcaatcacctcctttcgaaggcgtgctattattgcatgggtttatccctattttctgatataataaactgccattttttgttcctacaattttaaatggtaatcctggcgtgtacttaatccagtaagcaaaacgacgtcctacttcacgttgatcattcgtgctacaaaccacattatatttctttcttaattcaccataagtgaacgtacttccaactggttgttgaaaagatttagcaattataaaattataaagcttttcttgctgcttagatttcttattcattttaaaattcctccaataatttttaaggagtcaatcaatatcatataggttaaactatcttcaattgattgctataataagcataaatgaagcattatgattagacgcggaacaaaaaatggggagggggggtatatattgatacctacgctagaagaaattattgataagtatggaaacttagttgattatttgaaatttgatgtaacagttgaggtttatgaagatttgttgttattaagaagtttaagcgatttaaatgaacatcaaaagatggatagagtttcatttataaaaaaacatttaaactcaaatttcgattatttattagatgatactgagtttagaagtatcaataagatttacagtaatttaaatatcatgacgcatatcaatagtcaaaataataattttaaacgtaatccatttataaatgaagaacaattgaaatcactactcgcgataaagaaagtagatgcacatatgagttatgattcaaatattacttcaaaagcattggcagaaataaacaaaacgcaaaaaagattagttacaaagatagacacactctataatcagtcaaaaaaagaaaatgaatatgtacggttaggagaaaaaatatcgtatacaaaattggagaatcattggaaatatttatataatgagattcagttttataatcttaataatcaattgattagttatgttgcattagaacaggaatatgcttgggcttttttaaatgaactattttatttgatagaattgtatttgaaggcatttaaaggacaaaagaaaacagattatgagtttgggaaaaaattaaacgaatttattcaatcatatgtcattattttacttatagatatacgattacctgttgttagattatatattattagagacattgtagatacatgtgaaggagaaaaagataattacaaaagaattacactgatagaagaatctattaaaaagtatagatacgtaaaagatcagattaaaagatttaaaaatggattagaagaatcgttattaaatgcaactttatctattgaacaaaatatgttgaaagttaaaattgattattataaagcctactgctttcctagagaaaaaacaaagcataacaatattgagtacaatgtatcgttgttttttaaagcattagatgccttaaagaaatagtttttcactgaaaatatttatagatataattaaaattaattaatattaagccaggataatgtagtcttaatcgttctgaaatacgaaaaatgttgtggaaatcgcgtgaaataatcagaggaatcgtttgaaatcatcgtagtaatcgcgcgaaaatcacgtgaaataatcagaggaatcgtttgaaatcatcgtagtaatcgcgcgaaaatcacgtgaaataatcagaggaatcgtttgaaatcatcgtagtaatcgcgcgaaaatcacgtgaaataatcagaggaatcgtttgaaatcatcgtagtaatcgcgcgaaaatcacgtgaaataatcagaggaatcgtttgaaatcatcgtagtaatcgcgcgaaaatcacgtgaaataatcagaggaatcgtttgaaatcatcgtagtaatcgcgcgaaaatcgcgtgaaataatcagaggaatcgtttgaaatcatcgtagtaatcgcgcgaaaatcgcgtgaaataatcagaggaatcgtttgaaatcatcgtagtaatcgcgcgaaaatcgcgtgaaatactatggtagacggtttgagtaaattaatggagtattttaatatttatggtttggaggaattgcgttgcatagagaaagtaaatatatagagtataagaaatcacgaaaaggattatctaatgatatttggtctacgtatagtgcttttgcaaatactgaaggtggtactatatatttaggaattgaagaaaaaaagatcgaggacaaaaaagtctttgtttcagttggtgttgaagatccagagaaaatgattgaagatttttggaatgcactatatggaagaagtaaagttagtcaaaatattttatcaaataaagatgttaaaattgttaatattgaaaataaagcgtgcattgaaattcatgtaccagaagcgccttattcgaagaaaccgatatatgtagataataaaaaagatttagtatataaaagagttgatgatgctgatagaattgcgactgaagaagagtataaattcatgattgtaaattctcaagacgatatagatacagaattattagataactatgacatgtctgatttaaatcacgaatctatcgaaaattataggaaacttctattaaaaaatactaatgatgagagatatgcgaatatgagccaactggatttaatgatagatttaggagcatatagaaaagatagaagttcgaaagacaaacagtataaaatgactacagcatgtttattattctttggtaagtataatgcgattagtgatagattcccaggatttcaattagattattttaagaaaacaaattacctagatactgattggaaagatagaatatcaagtggagatttaggtaatgaagatttaaacgtgtatagtttttttgaaaaagtattgataaaattaactgataacattgaggaatcatttagcctaaatgatggtttgactagacaaaattatgcaagagatttaaaagtagcaattcgcgaagcactggttaatacattaatgcatgcgtattatgatactaagcaaagtattaaaatagttaattgtgaagattttatagagttttataatccgggtaatatgagaataaataaagaagattttattcatggagggcattcaaaggacagaaatagtatattatcgacgcttttcagaagagtaggatattcagaaaaagctggatctggaggaccaaggatattcgatgtagttaatagacataagcttaaaacgcctgaaatagaattaacggacatggacactaatgtagtactttggaaacaagatttaatgaaggagtttgaaaaatatcctgagttagacaaaaaagtaataaagtatattattgactatggatcaataagtaagggtgaagccttaaaaatggaaaatatgacagaatatcagtttagaaatattttaaaaaaactaaaagatgataacttgataaaaaaagaaggtgaaggtccggctactaaatatgtgttaatagaatcaaaagaagctgatatattgcgaactaaaaaagtaattaaaagtttagagtctttctttaggaataaataaaaaaacaagagataggtgcgaagtgtttggattatacaaatgcttcgcatcttatatttattaataaatatcatagaaaaccgtatcattaaccgatacgcagagatgcggttttttagacacttcataaagggattttgaacgtatcagaacatatgaggtttataggaattgctgttatgttttttgatcacatcaataaacaaaaaaggtatgtactatgtaaaatatttattaaatgatataaagcgagggtatataaatgatttttaaatagatatttatccaataatataaaaaggaactataagctatatctaaaagctatatctaactacttatagtccttcttcattagtataaatataattattaagaaaggtatatatctttgtaaccttcgtttacattaataatgttgtgataacctttgtgttctaaaataccaatagctatagaacttctaatgccagactgacagtctacataaataacatcgtttctattgaaaggtaaatctgtttctaaaagtttgccgtgtggcacatgaaccgcttgggataagtggccattattccattcattatcattacgtacatctaagacatgtgcttcattaccagttatgtctttactatgaacagattgtgtttgaatttgagcttgtggtaactgatatccagacacattatcatatccaataagttgtaaagtatgttatgtgttgcttttgaaacaaggtgatagtctccaatcaagttaatttcttgattatagtttagataccagccaatttgattgatgaaatttttatcatatggaatattgattgtaccttcaatatgtccaccatgataagcctccttactgcggagatcaaaagttaatctgtttgtacttgtagctggataaaccgtataaggttgatataaattcataccgaattgattaatttttttcatttgtgcaaaatgatgtggtggtgcaggttggtcagaaatgagtttatcgataaaggtagcttcattattttcagaaaaagcccagttcgtttgtttttcatagccaagcgtagatgttggaatagcacctaaagatttaccacaaggactaccagcgccatgaccaggccaaatttgaatgtagtctggcaagtctttaatactttcaatagatttaaacatttgttttgcgcctatttcagataatccttctactttaacagctttttctagtaaatcaggtctaccgatatctcctacaaaaataaaatcaccactgaatagtcccattggaacttgtgctccagcaccttcgtcagtaagtaaaaaacttatactttctggcgtgtgaccaggtgtatgaagcacttttaattttatatttcctacataaatatcatcattatgttgaacaaaatgagtgtggttaggcatatttttataacctaacatgtcatcactttcgcccgatacataaatactagcatttaactttatagcaacatctctaattcctgaaacaaaatttgcatgtatatgtgtttcagctgcatgagtaatggttaaactctcttcatcggcaactcgaatatatgaagataagtcacaaataggatcaatgatcatggcttctccagttttttgacaaccgattaaataagatgcttgagataaatgtttatcataaattgatgatagtcaatttgttatcaagggtgataattatattaactatggtaattacatggaattaaagttattaaacaaacttgatgatgaccaattagatttagaatttttacaagataatgggttaaaaggtaatgttcaaggtcctatgactttaaaggaacctttaaaaagttatatacaaaagtcttgaaaacgaatattttaaatttagataatgagttagaaaacactgaatatgtcgaaggtaaaccatatgtacagtacggtattaaatatgaaagaaatcaggcattaagaaatgaagctattaaaattcatggaactacatgtaaagtatgtggatttgattttaaagctaagtatggcgatttaggtgagggttttattgaaattcatcatttaaaaccaatgttttcaataaaaagagaaataaaagtaaatccacaaaaagatttagtcccactatgttctaattgccataaaatgattcatagaaatactaaaaaacctttaacgattaaagaattaaccaaaatagttaattataatagcaaataatttaatattttataaactatcattcaaccctcttaatttattaggaggttttttgtatttatgctttcaaatgtgtgatatactttgtttgttgaaatatagagtatctatagatagggtgattgagtatgaaattcactgaagtggaagttatcgaacatcttgtaaaggcatataaagaagcaggaaagcctacttatcctcatgaaaatttatatcgaggacgtaatcatagtatttcaggtattggagaagacttgctgggtgcttatttgattagtagattggaaggtgtccaaatatttattgatcagcctttatctatgattgataaatctttaagtacaagatatccggatttattaatttgtgaagataatgaaattaaaaatatactagaagttaaaatggacttaggatatcaaagaaaagattttatagattattgccgaaagaaagaagaatggatttcaaatatcgtaggaaaacagtgtgtattgtctagaaagagagaagacaaaattcctatgaatatagctgatgatattaaatttcatgttgtgatttacagtgaaaacaatggaccgaagcggtttgatgaagaaatcatgcctatcgttaatgaaacatgtccacatattgaagtatatgtcctaacaagcggtcaacaccctaatttagtaaatgttaatcttgaaggtattaatattaataaagatgaatttgaaatattagtaaatgcgttataaaaaaatagagcatcctccacgttatggaggtgctctgttttttattgaaaagtatcaagttaattaatttaatatgcttaataagttctaccttgacctttttctctagcttctgttcgatctcttatgtactcagtacatactggattttctgttaattcatcaactgtattagtttaatcagaagacgtgtctactttgtaagcttctaagaacttattatatgatatagcgtttgagttttgttgttcttctataaatttctgtagttatttttcaaaaaccgcatcattaactgataagcagaggcgtatcataagtaaaactaaaaaattctgtatgaggagataataatttggagggtgttaaatggtggacattaaatccacgttcattcaatatataagatatatcacgataattgcgcatataacttaagtagtagctaacagttgaaattaggccctatcaaattggtttatatctaaaatgattaatatagaatgcttctttttgtccttattaaattataaaagtaactttgcaatagaaacagttatttcataatcaacagtcattgacgtagctaagtaatgataaataatcataaataaaattacagatattgacaaaaaatagtaaatataccaatgaagtttcaaaagaacaattccaagaaattgagaatgtaaataataaggtcaaagaattttattaagatttgaaagagtatcaatcaagaaagatgtagttttttaataaactatttggaaaataattatcataatttaaaaactgacaatttgcgagactcataaaatgtaataatggaaatagatgtaaaatataattaaggggtgtaatatgaagattaatatttataaatctatttataattttcaggaaacaaatacaaattttttagagaatctagaatctttaaatgatgacaattatgaactgcttaatgataaagaacttgttagtgattcaaatgaattaaaattaattagtaaagtttatatacgtaaaaaagacaaaaaactattagattggcaattattaataaagaatgtatacctagatactgaagaagatgacaatttattttcagaatccggtcatcattttgatgcaatattatttctcaaagaagatacaacattacaaaataatgtatatattataccttttggacaagcatatcatgatataaataatttgattgattatgacttcggaattgattttgcagaaagagcaatcaaaaatgaagacatagttaataaaaatgttaatttttttcaacaaaacaggcttaaagagattgttaattatagaaggaatagtgtagattacgttagaccttcagaatcttatatatcagtccaaggacatccacagaatcctcaaatttttggaaaaacaatgacttgtggtacaagtatttcattgcgtgtaccgaatagaaagcagcaattcatagataaaattagtgtgataatcaaagaaataaacgctattattaatcttcctcaaaaaattagtgaatttcctagaatagtaactttaaaagacttgaataaaatagaagtattagatactttattgctaaaaaaactatcgaattcttcaactacagaaaatatatctatagatatatcaagatttttagaactaagtaatatgatactcttgttagatgatatgctcgacgtcaatatatatatataaattcttttaaaaataatacattagagacatttgatgcgactgatcctgaagttgattacatcactgaaataggagattacttattaaaatatgacgttaattctataaatgatgtcagaattgaagtgatagataatttggggcattcaaataatatgctactaaaaacgatactacatgcagaagttgaaatggaagatggaaagaaatatttattacaaaatgggaaatggggttattttaatagagaattttttgaccttttgaatgatcatttgaatgagatagaaattaggtataacacactaactcccacaggtttagtatttaaagaaggagaagaaggatatataaaagaaatagtaggaagattgccagaagaatatttaatgttacataaaaaattcataaaaccaataaataagaattttatagtaaaaggaaatggaatagagttggcagacttatacaatattaaaaacaaagagcttttcacgattaaaagaggaattaatacatctttatctctttatagtctagaacagaatataatagcaattaacgccttaaaatatccagaatcatataattttgaagaattaatagaagctattcctgataactcggaaaatatatttaatgatatacaacggagtacaaattttagtatagtatggattttaccgatatcatctattgataatatgcccataaaagatatggttcatactagtaacgtaataaataaaaactttcaattaactaatttaggttcagtattacttaaaaataaattagtagagtggtctctctatttaaaagatcaaagaattaatccaattatttatatggaaacgccaactgaagatagaaattaaacttttattttaaatcaccctagttcatacctaaaagactttcacacaaacaaaggaggaaacttaaattcctcctttcccttattactcatactataattcaattttaacgtcttcgtccatttgggcttcaaattcatctagtagtgctcgtacttctgcaattgattgtgtgttcatcaattgatggcgaagttcgctagcgcctcttatgccacgcacatagattttaaagaatctacgcaaactcttgaattgtcgtatttcatctttctcatatttgttaaacaatgatagatgcaatctcaacaaatctaatagttctttgcttgtgtgttcgcgtggttctttttcaaaagtgaatggattgtggaaaatgcctctaccaatcatgatgccatcaataccatatttttctgcaagttcaagtcctgtttttctatcgggaatatcatcgttaattgttaacaatgtgtttggtgcaatttcgtcacgtaaatttttaatagcttcgattaattcccaatgtgcatctactttactcatgcgtttgataaaaacttaaataatattaattcggtcatcagtggcgttaaatcttttatcatttttagttatagttgataaatttatatttataagcatatatggatatttcatcaaaaatttttatttatataaatccgaactgcatacatatttgtttaaataagaggtattatttttcgggaaattgctgtctgagttaaaaggattagttttataaaatgagttgaactatagcaaaaacgattaaaatactgataatccatttttgtattatgttagggacttttttacttaattttaaccctattggagcaaatataatactccctattataaggaataaggcgtcatataaagggatataaccttgaataagtttgatgacaaaagcaccaattgaagatataaaagcaattactatactattagcgactacagtattcattggtaatttgaataaaaccaataatataggaataataatgaaggcaccacctgcacctactatacctgaaataataccaatgaaaaggccaatgataactaataaatatttattaaatgaagacttttcggaactaggtttcactttaataaacattaatgttaatgcaagtaaagcaataatgatatataccgtatttacaaatgtagcatcaaataaatttgctagaaatgcacctaacatactccctataatcatgccgccacccatataaagaactaattgtggcgagaactctgttttttttcgagcttttaatgagccacttaatgtactgaaaaagacttggctagaagtaagacctgatgcgatatatgcgctatatgcaggggctccgaataatggtggtaataataaaatagctggataaataatgatagcaccacctacgcctactagaccagatatgaacccaccgaataccccaatgagtaacatgataactatattaacaatatccattacttacttttcaccaataagtttacagcttcattaattaactcttgggagctttcttcatcatccgcagctgcttttacacattctattaaattctcactaataatgatacccatcaagcgttggagtgaactctttgatgcacttatttgtgtaatgacatctttacagtcttttccttcctccatcattttaataattccatttagttgcccttgtattctattaatacgattaatcatttttttatcataattcatagtcatacctccacttttaattgaataaaaatatattaatagataaacacaaatgtgtcaaatacccctagaggtatttgacaagttccatccaactgtttaaaatacccctacaggtatttttagggaggttattatgaaacaatacggagaaaagtttatcgatgaatttagtaaagcagaattggaaaaactagccaagcaagggcaattaattgacgttagaacagaagaggagtatgcattaggacatatcaatggttccatacttcatcctgttgatgagattgagtcattcaataaagaaaaaaataaaacctattatgtaatctgtagaagtggtaacagaagtgctaatgctagtaaatatttagctaaacaaggttataacgttataaatcttgatggtggttataaagcttatgaagaagaaaacgatagttatgatacacaagaagaatataaaagtatagaaattaaagcagatcgtaaacaatttaactatcgtggtcttcaatgtccagggccaattgtaaaaattagtcaagaaatgaagaatattgaagtaggtgaccaaattgaagtcaaagtcacagaccctggattccctagtgacattaaaagttgggtgaaacaaacaaggcatactttagttaagcttgatgaaaataacaatggaattaatgcgattattcaaaaagaaaaagcaaaagatttagatataaattattctgctaaaggtactacaattgtattatttagtggagaattagacaaagctgtagcagcgttgattattgcaaatggtgctagagctgctggaaaagatgtaactatcttctttactttttgggggcttaatgcattaaaaaaagtgcaaacagttaatgttaaaaagcaaggtattgcaaaaatgtttgatttaatgttgcccaaaaagaatatacgaatgcctctttccaaaatgaatatgtttggtttaggaaatatgatgatgcgctacgtaatgaaaaagaaaaatgttgattcattaccaacacttatcaatcaagctattgagcaaaatatcaaattaatcgcttgtacgatgagtatggatgtcatgggtattcagaaagaagaacttagagatgaagttgagtacggtggtgtaggcacttatattggtgctactgaaaatgcgaatcataatttatttatctaattaaatctattaataaaaggagttgttatcatgttttttaaacagttttacgataatcatttatctcaagcatcatatttagtgggttgtcaacgtacaggagaggcaataataatagaccctgttcgtgatttatcgaaatatatagaagttgcagattctgaaggtttaacaattacacaagctacagaaacacatattcatgctgattttgcttcaggaattcgtaatgtggctaaacgcttaaatgcaaatatatatgtgtctggcgaaggtgaagatgcattagggtataaaaatatgccatcaaaaacacaatttgttaaacatggagatatcattcaagtaggcaatgttaaattagaagttctgcatactccaggacacacgcctgaaagtattagctttttactcactgatttaggtggtggttcaagtgttccgatgggattatttagtggtgactttatttttgttggtgatataggtagacctgatttattagaaaaatctgttcaaataaagggttctacagaaattagcgcgaaacaaatgtatgagtccgttcaaaatattaaaaatttaccagactatgttcaaatctggccgggtcatggtgctggaagcccttgtggtaaagcattaggtgccatacctatatctacaataggttatgagaaaattaataactgggcatttaatgaaattgatgagactaaatttattgaatcattaacatcaaatcaaccagcaccaccgcatcattttgcacaaatgaaacaagttaatcagtttggtatgaatttatatcaatcatatgatgtttatcctagtttagataataagagagtagcatttgatcttcgtagcaaagaggcctttcacggtggccacacaaaaggaacaatcaatataccatacaacaaaaactttattaatcaaattggttggtacttagattttgaaaaagatatagatttaattggagataaatctactgttgagaaagcgaaacacactttacaattaattgggtttgataaggtagcaggctatcgtttgccaaaatcaggcatttcaacccagtccgttcatagcgctgatatgacaggtaaagaagaacatgtattagacgtacgtaatgatgaagagtggaataatggacacttagatcaagcagttaatattccgcatggtaaattattaaatgaaaatattccttttaataaagaggataaaatatatgtacattgtcagtcaggtgttagaagttcaattgcagtgggtatattggaaagcaaaggttttgaaaatgtggtgaatattagagaaggctatcaagattttccagaatcattaaaataatttaaggatgtggaaaaaatgaataagcattatcaaattgttattattggtggcggtacagcaggtgttaccgtagcatcaagactattaagaaaaaatcaaaacttaaaagagaaaatagcaattatagatccagcagaccatcattactatcaaccattatggacgttggttggtgcaggggtatctagtttgaaaagttctcgtaaagatatggaaagtgttatacctgaaggtgctaactggataaaacaggctgtttcaagttttcaacctgaaaataatagcgttattttaggagataatacagtcgtttattatgattttttagtagtagctccaggattacagattaattggtcttcaattaaaggactaaaagaaaatataggtaaaaatggtgtttgctctaactattcacctgactatgttaacgaaacttggaaccaaatttctaattttaaacaaggaaatgccatttttacgcatccaaacactcctataaagtgtggaggtgcgcctatgaaaattatgtatttagctgaagattattttaggaaacataaaatccgttctaacgctaatgtgatatatgcaacgccaaaagatgctttatttgacgtaggaaaatataataaagaattagaaaggattgttgaagaaagaaatataacagtcaattataattataaccttgttgaaatcgacggtgacaaaaaagtggctacattcgaacatatcaaagcatacgatagaaaaacaataagttatgatatgttacatgtaacaccacctatgggtcccttagatgtagtaaaagaaagtacactttcagatagtgagggttgggtagatgttaacccaaccacattacagcataaaagctactctaatgtatttgcacttggtgatgcttcaaatgtacctacttcaaaaacaggcgcagctattcgtaagcaagcacctatcgtcgctaataatttattgcaagtgatgaataatcaaatgttaacgcatcattatgatggttatacttcatgccctattgttactggatataataggttaatacttgcagagtttgattataataaaaatactaaagaaacaatgccgtttaatcaggccaaagaacgtagaagtatgtatatatttaagaaagatttattacctaaaatgtattggtacggcatgctaaaaggattaatataataaagtacagaaaacaataaatttttaatgaaaaatcttttactataaaagattaagtatttaaatgacgtgtcagtgttgtgtttatatgtcgtgaatttttagctctaaatagtataagattgaaaaagttgttactgttttaaatgatcacgatgaagtcattcaataagaatgattatgaaaatagaaacagcagtaagatattttctaattgaaaatcatctcactgctgttttttaaaggtttatacctcatcctctaaattatttaaaaataattaatggtatttgagcacgtttagcgactttatgactgacattaccaatttccatttcttgccagatattcaaaccacgtgtactcaaaatgatagcttggtatgtacctccaatagtaatttcaataactttgtctgttgaacactaagagcaattttaatttcataatgtgttgtaaacattttttttgattggagtttttttctgagttaaacgatatcctgatgtatttttaattttgcaccatttccaaaaggataagtgacataagtaaaaaggcatcatcgggagttatcctatcaggaaaaccaagataatacctaagtagaaagtgttcaatccgtgttaaattgggaaatatcatccataaactttattactcatactataattcaattttaacgtcttcgtccatttgggcttcaaattcatcgagtagtgctcgtgcttctgcaattgattgtgtgttcatcaattgatgtcgaagttcgctagcgcctcttatgccacgcacatagattttaaagaatctacgcaagctcttgaattgtcgtatttcatctttttcatatttgttaaacaatgataaatgcaatctcaatagatctaatagttccttgcttgtgtgttcgcgtggttctttttcaaaagcgaatggattgtggaaaatgcctctaccaatcatgacgccatcaatgccatatttttctgccagttcaagtcctgtttttctatcgggaatatcaccgttaattgttaacaatgtatttggtgcaatttcgtcacgtaaatttttaatagcttcgattaattcccaatgtgcatctactttactcatttctttacgtgtacgaagatgaatagataaattggcaatatcttgttcgaagacgtgcttcaaccaatctttccattcatcgatttcatagtagccaaggcgtgttttaacacttaccggaagcccacctgctttagtcgcttgaataatttcggcagcaacgtcaggtcttaagattaagccggaacccttaccctttttagcaacatttgctacaggacatcccatatttaagtctatgcctttaaagcccattttagctaattgaatactcgtttcacggaactgttctggcttatctccccatatatgagcgaccatcggctgttcatcttcactaaaagttaagcgtccgcgcacactatgtatgccttcagggtggcaaaagctttcagtatttgtaaattcagtgaaaaacacatccggtctagctgcttcacttacaacgtgtcgaaagacgatatctgtaacgtcttccattggcgccaaaataaaaaatggacgtggtaattcactccaaaaattttctttcataatatatttataccctctttataattagtatctcgattttttatgcatgatgatattaccacaaaagcctaacttatacaaaaggaatttcaatagatgcaaccatttgaaagggaagtctaagagtagtctaaaataaatgttgtggtaagttgatcaatacaaagatcaaggattatagtattaaattgttcattattaatgatacactacttatgaatatgattcagaattttctttggctacttttacagtaaagcgattttttagttatcttataacaaagacaaatttataaaggtgatattatggaaggtttaaagcattctttaaaaagtttaggttggtgggatttattttttgcgatacctatttttctgctattcgcataccttccaaactataattttataactatatttcttaacattgttatcattattttcttttccataggtttgattttaactacgcatataattatagataaaattaagagcaacacgaaatgaatcattaatacgaatgtgattaaacataaaactgaaggagcgattacaatggcgactaagaaagatgtacatgatttatttttaaatcatgtgaattcaaacgcggttaagacaagaaagatgatgggagaatatattatttattatgatggcgtggttataggtggtttgtatgataatagattattggtcaaggcgactaaaagtgcccagcagaaattgcaagataatacattagtttcgccatatccaggttctaaagaaatgatattaattctagactttaccgaagcaacaaatctcactgatttatttaagaccataaaaaatgatttgaaaaagtgaagtagtgaagtgtgggtgcagagagaactaagcccatcgataaatggtcgcttgttaaagaagagtgacggtcactcttctttatgtgcatattttattttgtctgttttgttaacaagcagcagtgtaacaaatatgagtaaggataaaatgagtataatatagaaaccgaatttatcattaatttcattaatccatcttcctaaaaatggagcaattaaactttgcagtaacaatgaaattgacgtccatatcgtaaatgagcgaccgacatatttatctgaaacagtgttcattatagctgtattcatataaattctgattgatgaaattgagtagcctagtataaatgatcctatgaataagtaaaatgctgagtttatccaaataaatagtgctgaatttatgactaatatgaaatataacaaaaatatcaatactttagttgagattttcttcgaaagaatagctgaaattaaacctgcacataatcctccaatgccatataacatatctgaaaaaccaaattgtacagacgaaagttttaaaacattataaacatatcctggtaatgatatgttaaagatcattgtaaacaccattggtatgattgaaataactccaaaaataaatatcatcatgttgtcttttaaaaatttccatcctaataaatattcttgcaataagctatttgttgattcttcctctgaatgagttggtttatctacatgcaatctaaataacataaaaatgctgattagaaacatcattatagtcatcgctataattagagtgaatccatttattttatataatattcctgataatccacctgcaataaacatacctgtttgcaaactaatctctaatagagaatttgcatctgtatattgatctggttttaatatctgtttaactaaacttctagatgttgccatatacgtagtccaacctatcccattaacaatcgcaaatccaatcactaaataggtctcaaatcctatcattacgagtgctatgacaatgagtaaatataatattacctgaagaagataggtgattaaaataatatttcgtctattatatttatcggctagtccacctattataggagaagctaagaaaccggataatacatttaaagctaacataatacctaatagttgggagtcgttagttttgtcgattaaataccaattagccccaactgtactaattccaactccgaatgctgaaattatttctgctaaaaagaacaatctgaagtttttaattttcaacaaatcagtcataaatatcaccttttttcaatgcaagatttatatttgcgagctcttctataaattgagagtcgtttaaaatatcgaatggtttattgccttcgccgatcaaaaatctatagttagtaatattcataaactcaaatattaatttgaattggttgactaaaggttgtgctttggtatgcggattgtcgccacctatgattaaaatcaaatactttttttgtgacatgatttctttgaagttgtctatttgcgtatctcgcaatgactcggtccatctatcaatgaagagttttaaagacgcactcatggagtaccaatagagtggtgttgaaaaaataataatatctgattctaaaactttgattaaaatttgttcgtaatcatcattatgaaagttggcacctttgctatgacgattatctgtaaccttttcaatgttgctttgatataaattcacaaagttgacttttaaattcttcaatagattctctactgcgatagctgaattgccacctttctactacttccaaataaacaagtaatcatagtcataactcctttcgatttacctttataataatatttaatatattattattattaaatcagaattcttagaattcaggattcgataaaagggaaccctaaaggaggtactactttgaacttaaacattttaaaatcatttttagtaactagtgaaacaaagaaccttactaaagcatcagagttacttaactattcacagtcaactgtatctacacatattgaaaaattagaaaggcaattagatgttaaattattttatagaaaaaaatatggtatggaactaacggaagaaggcttagcatacgttaaatacgctaaagtgattttagatagtaatagcgaatacgagagagaaataaaaggactttacaataagaaggtaaatataagtattaacatgcaagaaagtcagtatttgtatcgctactataataagattagtgaatggttagctgaacacccatatgtaaacttgaagtttaaatccgcacattctaatttctatattaaagaagaaattgctaatttcaaatcggatattagccttatcacagacgaaaagattattaatagtaacttaactgctattcctataactgaagaacgtttaatatttgttactaacaaagagatgaaagatttcaaattaaacgatattcaaaaccatacattacttgttactgaaaaagggtgtagttacagagaacagttagaaatgattttatataaatatagcttttcaacaaaacaaatgattgaatttctaggaattgagtcattaaaaaaacacttgaaaaattcaggtgggattgcgctattgccggaatttattgttgcagatgaattagaaaataaaagtttgtttcaaatagacgtagatgtcgatattccgaatttagaaacaacattgataattaatcctgaatcgaataagcaagtacttgaatcttttgtaaaagatgtttttttataattattggtgaaaacgtgtagttatggtgaaactcaaagataataatttaaatgagatgttaatgaaaaagtaattcaatataaaaacaggtgatttatatctttaataaggattatttctagttgaaatttcaaattgcgggcattcattttcaaaatagtaaagaatttaatagatgaaaacctttgaatcatactagttagtatggattgattaatattttaacctgctaaatgagtagcttatgtattttaaatagctgtcatctagcaggttctttattattaataagttcagataaattattttagtctgttttctaatgttgataataataactttaaatctgtactttcattgtgagatatatagtacatcataaatttttatatttggattgagactctttggaagattttcaataaatgaatatttcacaaacttccacttatcaggattataaattataatttctgcaactgcattatcgaagattctaaacaattttttgatttctatttcttttagagataaagtagggaaaatgtcgatatattcttcaagcgcataaagactatgtttaacagaatcggttatgttcattgaatatatcacaccaatatttatattttgccatccaaaagaagaaataacattatcataaaatccattgaatataaattcagtcatcccctctgaacttctccataaatataatggtgaataagtatttgtaatgcaattagtagttgtttgacttattaaataagcttttataattaaatttttaaatccatcagtcttataaccatttaatcgaactctatctctaattatttccatattgtaatcactaggcaacttaacatgatattgcattgcatgcatttagcatacccccttttataaaaaggatagcaataataagtaaaatctcatattatccaattgtgatatagttatcataaaaagtgataggtgattaaattgaactttaatgatttggaaatttttataactgtatgtgaagaagcatctatcaataaagctgcaattaaacttagatatgcacaatctaatatatctcaaagaattagcaagcttgaaaatgaattaggtgtagttttgctttttagaaatcaaaaaggtgctaaggcaactaaagcaggcgaagaattcttagcgtatagcaaaaaagtattaagagatacagagactataaaaaataaaatgaaaaataatactatgtctattttatgctcagaactgttatttaattatttatctgagagcgaagaaattatgatgtcgaataactcaattaattttatttctagtggaaatattagaaaagctatagaaaaaaataattatgataaggttatttcattcataaaaattaacgactcaaattatagacttagtaatgttgatactatgaaagtaacgctttacagtaatggaagtaattatgataaagaggctttactaataaataaagatgagttttgtcctttaaggaaaataactttagataataagcttgattcacaacgggtaatggaaattgattcattggcagcaataataaacttagttaaacaaggaaaaggaaaggctttattacctatgacttttgagaataaaagagatatagtacaggacatttctaagatatttgaagttaactactatacttataatcatattatgcatcattaattgaaagttgattgagtttaaattacaggaacgattttaaaagtctagtagttagaatgagcgatgtgacagaaaagaaattatgccttttattttgtaaattcgttgttttaaagtaaaggtccttgtagtataggaaaaagtggatgacttctccgcctttaccaccctttcaagcataatgataactgctaaatattgattatagcaccattgcaaaactaatcattaattgtcatattcaactattttgaaaagtatcaatttcacattatcaaattattgagtatctcaatttattgttatacacaaacagtatttttgttatcatagagttaataaatataataaattaaacaagtaactttacaaaaattagaatgattcaattcaatcataattgtttgaaaatagaggtgagcaggtgaacgatatgttaattagtcttgtaatcccagtttttgctttgttagttattggtggtattatttggatgattatagaaggtatagtacatatttcaaaaaagaataaagcaattgataacttttttaaccaagttaataaagtaagtgagacatataaattcgctactacttttttatttctaatcttggctacggctggtatttctcaattttatctatattatatagtatcagcgtttcttttttggcttgtcatacttacctttggcattgcaggtatcatttttttaatgccatatggattatgttttctaccgttttataagcaaaaaaagaaaaaacagacatttaaaaaatacatggtttacactacgattggtttgtcaatttgtctaggcttatctctagttttggttcacactacgaaaatttatatggacgaaggtggcgtaagatactattacggtagttttgtaatgaaacaagcgggcggttatgcttatttagctttagcggtactttcaacgttgttaattgttgcgaaaaaagctacaaataaaaataaagaaatcgaaaccgtcgacaatacaaatataacggaaagataattaagggagtgctcattcaggagtgctcttttttgatgtccaaatttagttgcaaatgaaggcatagaagaaatttttatagtcatttattggataatgaattatggtcatatcgattaattttattagtgaggattttacaaacatttgttgaataaatatggtaatgataatatatgaatatttttgaaaaaacactaatatgattaaattatttgttaaaatagcattaagtaaaaaacaaatagggaacaaggtgggatttcatgagtcaattgctaaatgatacgttatcggcttggttgttaattgaatctttaagtccaggagaagtaaattttacagcggaagatatactctcagctgaacattttaaaaatggtgcaaagcaagcacaacttcaaagttttgatgaatattttgaaatatggaatgctgaacgctttattatatcagaagaaaaatcagagactggggaacttatatttaaattttatagacattgcttccgctataatgaaattaatttgaaaattcaggatatttttgatgattattctgagattcataatccaaatgggacacactgttatggttacacatttaacacagataaacacggcaaagtgatagttgattctatacatattccgatgattatgagtgcattaaaagaaattgaaaagaacaaaaatgccaatatagaagaaaaatttaatgattctgttgaaaaatttgttcaaaaagtaaaagaaattttagcagatgaaccaattaatgaatttaaattgaagaagatggacaaagcttatgatgagtacttttctgtattaaattcaaagaaagatggattatttggacattatgtagcaatagaatatgtgaaagatagtgatttaccacagccggaatttaacagcttcttcataagtgatattgagaaagcaagaaaatctcccaaccaaactttaattgattacattgaaggtgtagaagaaagtcagcgcatagaagtagatgaaaataaagaaatgtttgacaaatttttacatccttcacgtttgcctgatggacgatggccatcacagactgagtttagattgtctttaatgcaacaacttgctgtaaaccaaattacgagtggtaatgaaagaataagttcagttaatgggccaccaggtacaggtaagactactttattaaaagatatatttgctcatctagtagttgaaagaggtaaagagttagctaaactaaataatcctaaagatgcatttgtcaaaacaaaaattcatgaaacggatgataaatacgtatacttactaaaggaatctattgccaaatataagatggtagtcgcatctagtaataatggagctgttgaaaatatatctaaagatttaccgaaaattgaagaaattataagaaatcccgaaaaatgtaaattccctaaatatgaacagaattatgcaaatttagcacatgaattaaaagattttgctgaaatagctgaagatttgattggtgaaagtgcctggggcttattttctggagtttttggtaaaagtactaatattaaccaagtattgagtcatatgttaaaacaagatgcgaatgatattggctttgctaaattactacaaaatgagaataatcgtatgagttataacgagttaatgagtgaatggcaatcacatcaacgtgcatttttagaagagttgaggcatgttgaaatgttaaaagaagaatctattagagcatatgatgtttataaaaattgtgagtctttctctaagattgaacaggttattaatagtgaaaaaacaagtattgaagaacaggtatatcatttagataatgaaacgttacgagacaataaagaaatagaagatttggataatcgaattaattatattgttaagcaaatagaaactttaaatgagttaattaaatccatcaaagaaagcaacaaaggttttattaacaaactgaaagcgatgtttaattcagaagaagatgaaagctataaagatcataataaagagaagcaacaattattaacacaacagttagagttagagaaatgtaaaaaaaacaaacatgaagaccttgttagcaaactaaaagaaaaagagaaattaattaaacaattaactaaagtacagttgcaattagacgagttaaattcacagttacaagagttagaagcatatcgtattgagtcaaaaattacaattccagaaaaagatttttggagtgacaacaattatgatgagcgccaagttactaatctgtggacgagtgacgaacttcaatacagacgtgccatgctctttttaagagcaatgatattgcataaattattattgattgctaataatacaactatttattatgcgattaatgattttaaagatagaaggaaattaattgatgcaaatccagataaagtacacaacgcatggaatgtgatgcatttaatatttccagtagttagtacgacgtttgcaagctttaaatctatgtatgggggcataccaaaagatttcatagactacttatttattgatgaagcaggacaagcaatacctcaagcagctgtgggagcattatatcgttcaaaaaaagttgtagctgtaggtgatccgattcaaatagaaccggttgtgactttagaaagtcatttaattgataacattcgtaaaaattatcatgttccggaatatctagtttctaaagaagcttctgtgcagtctgttgcagacaacgccaatcaatatggtttttggaaatctgatgctactgatagtaatcaaaaaacctggataggcatacctttatgggtgcacagacgatgtttaaaacctatgttcacgatagctaaccaaatcgcttataataataaaatggtgttgccaagtaatattacaaaagtaggtaaaacaggttggtatgacgttaaaggaaacgcagttcaaaaacaatttgtgaaagagcatggtgaaaaagtagtgggattattagctgatgattggattgaagcaattaaggaaggtaaaaatgaaccgagctcatttgtaatatcgcctttttcagcagtacagcaacagattaaacgtatgttaaagcaacaactaccgactagaattgatattgaacgtacaaaaattaatcaatgggtcgataaatccattggtactgttcatacttttcaaggtaaagaggctcagaaggtgtattttgtaataggtactgataatacccaagatggtgctgtgaactggtcatgcgaaaaaccaaacttgttaaacgttgcagtgacaagagctaagaaagagttttatgtaattggcgacatgcaaagaatacagatgaaaccattttatgagacgatttttaaagaaagaaatgtaaaataacatacaaaaaagtatatagaggaagttatacattttaaaaggagcaaaattgaataatggagaaatttaacaactggatattaaatgcaataagtggatctcaaacagacaagaatgaaacaactgaagaattaaaaggggcaaaatttatcattttatatgcatattcaatgctcgttttgcttgcgttagtaatttctaacatattcattcacattttggagcctaaactatcaatcaccactcaaatcatcatcgttttgattttaattgaagcactaattggactgcgtttcttgaaagcgtacgatgttaagcgtggcaaagataaagaaaataagaaaaatagtaaggatttcgttaaactaaaatcaattttagtagcaattttatttacatcattggcgctgacagcaggtactgtagctgatatatacggtttcactgacttaggaaatactagaagtgatttaatcgtttggagcataggtggtattatatttggcctcgtatgttacacaatggaagataaaagataacgataaggagctggcgattataaagctagctccttttttaacttatatatgtaaagaactatcctaagggtttttaatcatatgtcaataatttctataatacattattaaaacatcaattaaataagttttaaaattttacacatatttttatttaaaaaagatgtataattaatgtattaaatatagaaagaagttgatattatgaaaaagtgtattaagactttgtttttaagtatcattttagtagtgatgagtggttggtatcattcagcacatgcgtcagattcgttgagtaaaagtccagaaaattggatgagtaaacttgatgatggaaaacatttaactgagattaatataccgggttcacatgatagtggctcattcactttaaaggatccagtaaaatcagtttgggcaaagactcaagataaagattaccttacccaaatgaagtcgggagtcaggttttttgatattagaggtagagcaagtgctgataatatgatttcagttcatcacggcatggtttatttgcatcatgaattaggaaaatttctcgatgatgctaaatattacttgagtgcttatccaaacgaaacaattgtgatgtctatgaaaaaggactacgatagcgattctaaagttacgaagacatttgaagaaatttttagagaatattattataataacccgcaatatcagaatcttttttacacaggaagtaatgcgaatcctactttaaaagaaacgaaaggtaaaattgtcctattcaatagaatggggggtacgtacataaaaagtggttatggtgctgacacgtcaggtattcaatgggcagacaatgcgacatttgaaacgaaaattaataatggtagcttaaatttaaaagtacaagatgagtataaagattactatgataaaaaagttgaagctgttaaaaatttattggctaaagctaaaacggatagtaacaaagacaatgtatatgtgaatttcttgagtgtagcgtctggaggcagcgcatttaatagtacttataactatgcatcacatataaatcctgaaattgcaaaaacgattaaagcaaatgggaaagctagaacgggttggctgattgttgactatgcaggatatacgtggcctggatatgatgatatcgtaagtgaaattatagatagtaataaataaggattcaataatgatattaagacgagtatgaaaatagttagattctaattattttcactactcgtttttattttgaaaataagtaataattcaacaatattataaattgaacagattgtttgtgaaatttttgataatattaaagtgaaaaagtgttataaattgataaatatatgtaattaacaaaaacaaatcattttaaaaagaagagagttgtaagatgatgaaacgattaaacaaattagtgttaggcattatttttctgtttttagtcattagtatcactgctggttgtggcataggtaaagaagcggaagttaagaaaagctttgaaaaaacattgagtatgtaccctattaaaaatctagaggatttatacgataaggaaggctatcgtgatgatcagtttgataaaaatgataaaggtacatggattataaattctgaaatggttattcaacctaataatgaagatatggtagctaaaggcatggttctatatatgaatagaaataccaaaacaacaaatggttactactatgtcgatgtgactaaggacgaggatgaaggaaaaccgcacgacaatgaaaaaagatatccggttaaaatggtcgataataaaatcattccaacaaaagaaattaaagatgaaaaaataaaaaaagaaatcgaaaactttaagttctttgttcaatatggcgactttaaaaatttgaaaaattataaagacggagatatttcatataatccagaggtgccgagttattcggctaaatatcaattaactaatgatgattataatgtaaaacaattacgcaaaagatatgatataccgacgagtaaagctccaaagttattgttaaaaggttcagggaatttaaaaggctcatcagttggatataaagatattgaatttacgtttgtagagaaaaaagaagaaaatatatactttagtgatagcttagattataaaaaaagcggagatgtataatcatggctcaatcagaatatgaaatcaatcccggaaaaagagagtgatgaaatgataaaacgtgtaaataaattagtgcttggtattagtcttctgtttttagtcattagtatcactgctggttgtggcatgggtaaagaagcggaaataaagaaaagttttgaaaaaacattgagtatgtatccgattaaaaatctagaggatttatacgataaagaaggatatcgtgatgatcaatttgataaaaatgataagggaacatggattgtaaattctcaaatggcaattcaaaataaaggagaagctctaaaaataaaaggcatgcttttgaagatagatagaaatacaagaagtgcaaaaggattttactatactaatgaaataaagacggagaaatacgaagtagctcaggataatcaaaaaaaatatccagttaaaatgattaataataaattcatttctactgaggaagttaaagaagaaaacataaaaaaagaaatcgaaaactttaagttttttgcgcaatatagcaattttaaagatttaatgaattataaagatggagatatatcatataatccagaggtgccgagttattcagctcaatatcaattaactaatgatgattataatgtaaaacaattacgtaaaagatatgacataccaacaaataaagcgccgaagctgttgttgaaaggtacagggaatttaaaaggttcatcagttggatataaaaaaattgaatttacttttttagagaataaaaatgaaaatatttactttactgatagtctacatcttgaaccgagcgaggataaataatcatcttttaaccagaatatgaaatcaatctaggacaacctaataaaaggagagagttgtaagatgatgaaacgattaaacaaattagtgttaggcattatttttctgtttttagtcattagtatcactgctggttgtggcataggtaaagaagcgaaaataaagaaaagttttgagaagacattgagtatgtatccgattaaaaatctagaggatttatacgataaagaaggttatcgtgatgacgaatttgataaaaatgataaaggtacatggattattggttctgaaatggcaactcaaaataagggggaagctctgaaagttaaaggtatggtcttgtatatgaatagaaataccaaaacaacaaaaggatattattatgtaaatgcaataaagaatgataaagacggaagaccccaagagaatgaaaaaaggtacccagttaaaatggtcgataataaaatcattccaacaaaagaaattaaagataaaaacataaaaaaagaaatcgaaaactttaagttctttgttcaatatggaaactttaaagatttgtcgaagtataaagacggagatatttcatataatccagaggtgccgagttattcggctaaatatcaattaactaatgatgattacaatgtaaagcaattacgtaaaagatatgacataccaacaaataaagcaccgaagttgttgttgaagggtacagggaatttaaaaggttcatcagttggatataaagacattgaatttacgtttgtagagaaaaaagaagagaacatttactttagtgatgggttaatttttaaaccaagtgaggataaataatcatgactcgatcaaaatatgaaatcaatccaggaaagataataagaagaataggattgtgaaattatgaaacgattaaacaaattggtattgtatattagttttttgatattagtcattagtttcactgctggttgtggcataggtaaagaagcggaagttaagaaaagctttgaaaaaacattgagtatgtatccgattaaaaatctagaggatttatacgataaagaaggttatcgtgatgacgaatttgataaaaatgataaaggtacatggattattggttctgaaatggttgttcaacctaaaggggaacgtatgaaatcaaaaggtatggttctatatatgaatagaaacactaagactacaaccgggaagtatatagtgagtgaaacacttcatgatgaagatggtagacctaagagtaaagataaagaatatcccgttaaaatggtagacaataaaatcattccaactaaaggtatcaaagacgaaaatataaaaaaagaaatcgagaattttaagttcttcgcgcaatatggcagctttaaagatttgtcgaagtacaaagacggcgatatatcatataatccagaggtaccgagttattcagcaaaatatcaattaactaatgatgactataatgtaaaacaattacgaaaaagatataaaataccaacgaataaagcaccaaagttattgttgaaaggttcgggagacttaaaaggttcatcagttggatataaagacattgaatttacttttgtggagaaaaaaggtgaaaatactttttttactgatagtctacatcttgaaccgagtgaggataaataatcatccacacacacgattcaatatgaaattcaaatatgttgctgtaaaataatgtaaaataaacgtattcatattactgaattgagggatagtatgcaacgtgattatttaattcgagtagaaactgagagtatgtcagatttcaaaaggctcaatagtttaatgattggttttgttattaaaggtgaggcacacatttatgatgaaaataatatgacgcaatgcaacagtggcgacattttcatcattaaccaccgcgacttgtatcgatttcaacttcaacaagatggcatcatatgttatatccaattccaaatgaaatatttagcagacaagtttgatgatgtgcattgtctatattttcacttaacagatgcgaccacaacaaagaatatacatcaactgagaaatataatggcaagactggtttcaacacatatccgacataatgagttgtctaaattgactgagcaacaacttgtgattcagttgcttatgcatatgattcattatgtcccgcgtacatatcattcgaaccaaagtatcttaaatgatgataaagtgaatcaagtatgcgactatatcgagttacattttcatgaagatttaagcctttcagaattaagcgaatacgttgggtggtcagagagccatctgtctaaaaagtttacagaatcgctaggtgtaggattccatcatttcttaaatacgacgcgaattgagcatgcgaaactcgatttgacatacacagatgaaaccattactgatattgcattgcaaaatggcttttcaagtgcagcgagctttgcgagaacatttaaacactttacgcatcaaacacctaaacaatatcgaggtgatcgtccagcaatcactgaaaaccagcaatcggcacaacatgattatcacgaccgtgaattgatattacttttaaatgactacattgaagaaatgaatcattttattgaagatattgaaaagatgaactataaagagattgcctttcaaccaaccaatcaccaactaaatcaatttaatcatattattcaagtgggctatttgaggaatttgctcaatacacagtatcaatcacagttgcttacatgtcatcatgattttcaagtcaatgaagtattagcatatgatgtgattccatatatcatgaaaaagctcaatgcgccattcacgtatgatgcagaaatttcgaatatattttatgatattgatttgtgtttagactttttattagatcataactttagtttgaccatgcatttggatcagtatgactcacgtgattatatcgatgcatttaaaatttttatccatcacgttgccctgcatgtcagtcatagaaaagatttgaagttcaacttgtatgtgacgacattgcacacgtctttgattgaaatgattgattattttaaagcattattccctaatggtggcttgtacattcacttagatcaagctacggaaagacatctaccattattgaaacgacttgagccacacatcgaccattttgtatttgatgccaattcaaatgacgctgttgattttaataaaatgaatgatgatgaatttaaaaccgcgagtcaaatgattattaataaaacgaattaccttatcgacttaatgcatcgtcatcgcctaaagcgtccactcattttactcaattggaatacattgacgggtgatacatttattacaaacggcgaatattttagaggtggtatcatcattgagcaattattaaaattaagttctaaagtagagggtatcgggtattggttgaattatgatttgcacgtcagtcattgtaaaaatgaacgggattatatgaattctattgaactatttcatcaatataatggaaaacgtccggtctatttcacggcattgctatttaataaattaacaagcaatattttgtattctgatgatacatgtattgtcacggggactgattcaaattttcaaatattgttatatgatgcaaagcattttaatccgtacttagcgttggacaatcaaatgaatatgcgtgcgacggaaatgattcatttgaacattaatgccctggaagaaggtatgtataagattaaacattttaccttagataaagaaaatggtgcgttatttaatctttggcgcaaacatcatacgatacatggcatggacaaggactctatagattacgttaatcgaatgagttttccgaaattagaagtatatgatatagatatcacggacacactggcattaaacattaaaatgattacgaatgggattcacttaattgaagtaaaacgttacccaagttcataaaatgatcacaaatcacaaattttgatatacataatttgtgattttttatattcaaagctaaaattgcaaaaaattaatggttaacatctctgttgttggcaatataaataatgattaatcatttatgatgtaactaaggagatgaaggatatgaatcaacaattaattgaaactttaaaatctaaagaaggcaaaatgattgagatcagacgttatttacatcagcatccagaattatcttttcatgaagatgaaacggcgaaatacatcgctgaattttacaaaggtaaagatgtggaagtagaaacgaatgtcggaccacgtggaattaaagtaacgattgattcagggaaacctggtaaaacattagcaatccgtgcagactttgacgcattacccattactgaagatacaggattatcttttgcatcacaaaataaaggtgttatgcacgcatgtggtcacgatgcacatacagcatacatgcttgtattagcagagacgcttgctgaaatgaaagatagttttacaggaaaagtcgttgtgatacatcaaccagctgaagaagtaccaccaggtggtgctaaaacaatgattgaaaatggtgtattagacggtgttgatcatgtattaggtgtacacgtcatgagcacaatgaaaacaggtaaagtgtattacagacctggttatgttcaaacaggacgcgcattcttcaaattgaaagttcaaggtaaaggtggtcatggttcatcaccacatatggccaatgatgccattgttgcaggtagctacttcgtcacagcgttacaaacagttgtatctagacgactaagtccatttgaaaccggtgttgtcacaatcggttcatttgacggtaaaggtcaattcaatgtcattaaagatgttgttgaaattgaaggtgatgtacgtggattaacagatgctacaaaagcaacaattgaaaaagaaattaaacgtttatcaaaaggattagaggatatgtatggtgtaacttgcaccttagaatataacgatgattatccagcattatataatgatccagagtttactgagtacgtggctaagacgttgaaagaagcaaaccttgattttggtgttgaaatgtgtgaaccacaaccaccttcagaagactttgcatattatgctaaagaacgcccaagtgcctttatttatacaggtgcagcggtggaaaatggtgaaatttacccacatcatcatcctaaatttaacatttcagaaaaatcattacttatttctgcagaagcagtagggacagttgttttagattaccttaaaggagataactaacatgaatgaaacgtatcgcgggggcaacaagttaatcttaggtattgtattaggtgttattacattttggttgtttgcacaatcacttgtaaatgttgtaccgaatttacaacaaagttttggtacagacatggggacaattagtattgcggtcagtctaactgcactattttcaggcatgtttgttgttggagcaggtggtctggcagataaaattgggcgcgtgaaaatgacgaatatcggtttattattaagtattattggttcagcattaattattattacgaatttaccggcattattaattttaggtcgtgttatacaaggtgtatcagcagcgtgtattatgccttctacattggccattatgaaaacttattatcagggtgctgaacgtcagcgtgccttaagttattggtctatcggttcttggggtggcagtggtatctgttcactcttcggtggtgcagttgcgacaactatgggttggagatggattttcatcttctcaattatcgttgccgtactttcaatgttactcatcaaagggacgcctgaaacgaaatcagaaattaccaatacacataaatttgacgttgcagggctaattgttctagtagttatgttgctaagtttaaacgttgtcattactaaaggtgcagcacttggttacacatcattatggttctttggtttgattgcaatcgtaattgtagcattctttattttcttaaatgttgagaaaaaagtagataatccacttattgattttaaattatttgaaaataaaccatatacaggtgcaacgatttcgaacttcttattaaacggtgttgcaggtacattaattgtagcgaatacattcgtgcaacaaggtttaggttatacagcattgcaggcaggatacttatcaattacttatttaatcatggtgttattgatgattcgagttggtgaaaaattattacaaaaaatgggttctaagcgaccaatgttattaggtacattcattgtggtcattggtattgcacttatttcattagtattcttaccaggcatattttatgttatcagttgtgtcgtaggatatttatgtttcggactaggcttaggtatttatgcaacaccttctacagatacagctatttcgaatgcaccgttagataaagttggcgttgcttcaggtatttataaaatggcttcatcacttggtggcgcattcggtgtcgcaattagtggtgctgtatatgctggtgcagttgctgcaacgagcattcatacaggtgcgatgattgcactttgggttaacgtattaatgggaatcatggcatttatcgcaattttattcgcgattcctaatgatgataaacgtgtcaaagatgcgaaataataacgatgacacgccaagtgttttgataatgatataaatgaaagtaaagcaaattaaatgaggaaatgtatagagcagtgcatatagataaatctatgattggattaacactaatataaatataaatgaaaatgaaaaaccatccacttaaatttttgataagttaggtggatggttatttattgcgttgttctaaaaatttggacatttatatggaaagaactatatataatgtgaaggttatggcaattcgcttcaatgaaggcgacgtgtaaaagtgtatattaaacgtttcggggtcagactccgagaacagtgtccgtcatgcttaccgcatactaatgaagcattattatatcagtgtttatagccgatttaagataataaattttgctaaacaaaaaagccaacccatgaatgttggattggctttttacatgcatctgaatctctaattttaaaaaaatatgaatataaataagacagtaaaaattaaatttcagttgttgcaatttcttcatctgtaggtacatcatcgttaaggccaacaagtgcttcagaaacatttcgtgaatgataaccgatacgttcaagaacaccaatcatatcgatatatagtaatccgccttttgttgtacattcaccacgattaaggcgtttaatatgacctttgcgtagtttatgttcaatattaaatgattctctactacgttctacaatttcatcttttttcgttttgtcataaacatctaacatgtcgatggctttatcaaatgactcagcaacatggttgaataatttatccataccgcgttgtgcatcttctgtaatgcgaatatcttcatcatgttggcgttttaattgagcgacatactcttctgttagctctgctacttttaaaatagagcgattgacatcaaacataactgctaaacgctcaacgtctgccttcgtaatggcttttgtagaaattctaactaaataatttcgaatgctatcattgattgtttcaacagcttgatgcttttgttcaagctttttgatcaattttttatcgtcttttgtaatttcgcgaatgtcttcaaacattgataagacaatctgacccacattttgtaattctttttgagtttcttgtaatgcaacaccaggtgcgtgataaacaagatctttgtttaagtgctgaggtttatagtcatcagcaatatctttacctgggacaagctttgtaacaatccatgctaaacctgctacaaatggtaattgaatcaaagtatttgttatgttgaagataccatgtgatactgcaatcgtcatcgctggttttaagtgccataaatcttgtaacaaactaatcaaatgaatcacaactggcaagaaaattgtgaagataattaccccgattaagttaaagatgacgtgtacaagcgccgcacgttttgcagcgattgagccggctaaactagctaagatagctgtaatcgtggtaccaatgttatcgcctagtaacacagggattgctgcgtttaagctaattaaatcttgttgataaaattcttgtaaaataccaatcgtcgcacttgaactttgaactagtgctgttaaccctgcgccgacaatgacagcgagtattggatttgtagacatatcaagcattaattgcttaaatccatctaatgatgctaaaggtttaacggcatcacccataaattctagaccgaagaatagtgaaccgaaaccgaatagtatgcggccaatgttattgattttagagcgtttaaagaaaaagattaagaatgcacctaatgctaaaattggcattgcatattcgcctaaatctataccgataataaatgcagttaccgttgttccgatattagcacccattatcactccaatggcttgtttcaatgtcataaatccagctgttaccagtccgattgtgataactgtcgtacctgaactactttgtattaaaatagttacaacgatacctgcaataacacctaatactggatttgatgtaaatttgtttaaaatatctcgtagcctgtctcctgctgatgcttgaagcccgtctcccatgatttttaagccgtaaaggaaaatacctaaaccacctaaaaaggagaaaatgacttctgtaaccgacatttccattatttcacctcaaataagctttatatttagattatcgcttataattgtaaatttaatgttaagattaggtaaaattatttaacaatatatgttatttgtatatgacttgtaaaatatcgtcacttattatgtaaattttcagtgtgaaatggcaggtttgcaatcacttgtttaacaaaatgatgcaatcaatcatgtaattatgtttcatcaaaaaaatcatgagagtggaacaacgaaataatttttatgaaaacatcatttctgtcccagtctcatgatttgaaatcaccaaataaaaatctattaatggttttcgttataacaatttgtgttcttttaataatgactcaatgtacgtaccttttatctttttaaggaatcctgctaatgcgagtttttgcattttcgaatctttagtaatctcacgcaaatcttggtggtcattcagttcgtatatggcatccattaagacgcgaagatcaaatggactattgatgacttctggaataccacgatctatatttagtaattgataaacagcttccatggcagtacgaaccgaatattctgttgtaaatacagtgtctcgctctgtttctgcaaagttaccaataaatgctaagttctgagattgatgcgggacgactaaaggtctgtcgccgatagcacgcgtcatgaaataagatgtgatatatggcatataaacaggaatcgtattagatgcatgttttgctaagtcttcaattttgtcagttgatacacctaagtgatacagccattcttggcatatttcattaccactacattctgtaattggctttttaatataatcgccgtttacatctgaatataaggcataaatccatgtagatatttcattttcaggttggtctttaaactgttgctgacgattgattgtaaaactcatttgccatgcagaatcattgattgtaataataccgcctgtaactgttttgcctgcaagtgggtcacgtttacaaatactttctattgtatcgataatctctttattgtttgttgtagaagttgctgaaacaaaccaactttttttaggaatattttggcaaaacttatcaggattaccaaattcaggactttgtcgcgctaaatttttccatagtgtccaactaccacctaattcgtcagttggtggcgctggtgtatcattatcaccataagtagagctttctgtaatactaccgtttgtcacaaagacaagatcgtttatagtcagtttaatagattctgcattaccattacggtcaattaatatttctcgggcaattttttgacttgtcgtaacatctattttaatatcttcgacttttacatcgtattcaaattgaaccccatgcgattttaaatattcaaccataggtaatactaaagattcatattgattatatttagtgaattttaaagctgaaaagtctgcgagaccactaatatgatgaacgaatcgcattagatagcgacgcatttccattgcagaatgccacggttcaaatgcaaacatcgttttccagtaaatccaaaagtttgaattaaagaagtcatcggaaaatacatctgttattttgacatcatctaaatcttcttcattcgttaagcataaatctaaaatttctttaatcgccgttttagtcaaagtgaagtctccgtctgtgactaaacgttgaccctgtttctcaataacacgacagcgagaatagttagggtcttctttgtttagccaatagaactcatctaatacagacgcgttatcgatttctaatgaagggatagatctgaataagtcccacaaacattcaaagtggttctccatttcacgaccaccgcggacaacatagccttttaaaggcatattttcaccatcaagactaccacctgctttaggtaactcttctaaaatatgaatcttcgaaccttccatttgaccatcccttattaaaaaacaagctgcagcaagtgaagctagaccagatccgattaagtaagcggatttgttttctacattttcaggttttttagggcgcgcaaatgcttcataatttccataactgtaatacatatccaccaagtcctttcgtattagaatacactcagactatacccctttgtgaattgcaaatattagtatttatattggtaaatttgacgaaattagatcatttttatatttttgatttttaaaattttatcactcgaatgtttttggattctgaggtgcgggacttggaataattatgtattttgaaagaagttacttaaactaacgcctagtagagtgataattccgcctataatagcaagggttgttggtagctcgtctaataacagataagataataataaagaaacgataggtgttaaataaagagacattgttgcatcagagacaccaactgacttcacaatataagcaagcaaaacgtatggaattatagtagggaatatagctaaataaagtaccgatactattgatgtaaaagtggcgccgtgtatatcgttgatgatttcaggaataaaaataagcataaatggtgagcttgccattattgtatatagtgtgaaagcgatgaagccgtatttttctatgtattttttctggaaagtaaaatacaaactttcactaaaagatgcaagtaaaataataaaaacacctaatacattaatagttgtgtaatcatctttacttattgaaataatggatattcctataaatgcgacgagtgaacttaaccaattccattttgaaaaatgctcttttaaaaatatataagctaaagcactagaaaaaataggcgttgtagagactagaattccagatatacctgcactaatcaaagtttcaccaaaatttaaagctgtgtgatatatcacaaatccacaaaatcctaaaataaaaataacagggatatctcttagttcaggggtaggcaatttctttataattacgaacggcaagagaattattgttgctaaaattaaacgaaatgccgacaatgattctgcactaaaatcatttaacgcaatctttatcattggaaatgcagatccccacaatatgatagtaaataaatatgatagaaaagtagtgtctcgaagtttattcattaatatcatcactcctttaattatgtgtttctatattaaaaaatatgatttaaaatgagtacaaccaattttgaatggatttacctatccaattttaaaagggagggagaagatggctaaatataaagatattgctagtgacataagagataaaataatcacaggggattggttttatggaatgaaaataccttcacataggcagttggcgatacagtacaacgtaaatagagtaacgattattaaaagtattgagttattagaagctgaaggatttatctatactaaagtaggtagtggaacatatgttaatgactatttgaatgaagcacatattacaaataagtggtctgaaatgatgttatggtcctctcaacaaagaagtcagtatacggtgcaattaattaataaaattgagacagatgattcgtatatacatataagtaaaggtgaattgggtatatcgttaatgccacatattcaattgaaaaaagccatgtctaatacagccagtcatattgaagacttatcttttggttataataatggctatggttatatcaagttaagagatattatcgttgaacgaatgtcaaagcaaggtataaatgtaggtagagaaaatgtaatgatcacttcaggcgctttacatgccattcaacttttatctattgggtttttaggtcaagatgccataataatttcgaatacaccatcatatattcactctacaaatgtttttgagcaattgaattttagacatattgatgttccttataatcaaattaatgaaattgataccatcattgatagatttattaattttaaaaataaagcgatttatatagaacctaggtttaataacccgacaggtcgttctttaacgaatgagcaaaagaaaaatataattacttatagcgaaagacataatattcctatcattgaagatgatatctttagagatattttctttagcgatccaactccttctatcaaaacttatgataaattgggaaaagttatacatataagcagtttttcaaaaacgattgcaccagcaataagaataggttggattgttgcttctgaaaaaataatagagcaattggcagatgtaagaatgcaaattgactatggatccagtattttgtcacaaatggttgtatatgagatgttgaaaaataagtcttatgataaacacttagtaaagttaaggtatgttttaaaagataaacgagactttatgttaaacatcctcaataatttatttaaggatatagcacattgggaggttccaagtggaggttattttgtatggttagtctttaaaatagatatagatattaaatatttattttacgaattgttaagtaaagaaaaaatattaatcaatccgggttacatttatggcagtaaagaaaagagtataaggctatcttttgcctttgaatcaaatgaaaatattaagcatgcgctctataaaatttatacatatgtgaaaaaggtttaattaaaacaataattcgaatcattatgtggcatgttaaacagctaaatataagctatgcacatttaacaagcggatactcctgacgcaattatagtatcattacatattgtttaatcgtttggggtaatgtaattaaaaggtaaaataggcagagtgttatacataaaatgtaaagaaagaggcgatagaatgtctaaaatcaggtcttttacaatattaagtctacttatttacttagctatgatgtgctatacagtagtgacctatccaaaattaccaaccaaagtgcctattcattataatttagcaggggatgctgataattttgctgataaatgggtgctgcttttgattaatagcgcatttatagtgatttggcttatatttttcattgcaggtagatactatgaacgatttgccaaatggtcacattataatcatacaccacgtgaaattcgagcgattaaattatttttaagtacgttaaatttagagattatgagctatatgtctatcttcacagtattagaaatttggcaaatacaacaccatcatcaattcaatttactatggtttaatatgatatttatcattatcattggtttgacgcttgtcatattttgtttacttcctacaattcataaaatgagagattctcaataaaaatataaactctcatgatgcagttttgaagcgaattcctgagattattataaataatatctagtatttataattaaaatgatatattatttattatagttaaatattgtgtatattttgtgaactttttgtaaaaattcgattgcctgtcacatataggagtgttacattttaaatatgtgatcatcgcaaaatataagttgaaataggttgtagattaatcagaatgataaatattttatataaagagagggagtcattatgacactacttactgtaaatccattcgataatgtcggattatcagccttagttgcagcagtacctattattttatttttattatgcttaaccgtttttaaaatgaaaggcatttatgcagcattgacaactttggttgttacattgattgtggctttatttgtatttgaattaccagcgcgtgtatcagcaggtgcgattacagaaggcgttgttgccggtattttcccaataggatatatcgttttaatggcagtttggttatataaagtttctattaaaacaggacaattttctattattcaagatagtattgcaagtatttcagtggaccaaagaatccaactattattaattggattttgtttcaacgcatttttagaaggtgcagcaggatttggtgtgccaattgcgatttgtgcagtattattaattcaacttggatttgaaccattaaaagcagcgatgttatgtttaattgctaatggtgcggcgggtgcctttggtgcaattggtttaccagttagtattattgatacgtttaacttaagtggaggcgttacaacattagatgttgcgagatactcagcattaacacttccaattttaaactttattattccatttgttttagtattcattgtagatggtatgaaaggtattaaagaaattttacctgtcattttaacagtgagtggtacatatactggattacaattattattaacaatattccatggtccagaactagcagacattattccatcactagcaacaatggtggtgttagcatttgtttgtcgtaaatttaaaccgaaaaacattttcagattggaagcgtctgaacataaaattcaaaaacgaacgcctaaagaaattgtctttgcttggagtccgttcgtaattttaactgcctttgtattagtatggagtgcaccattcttcaaaaaattattccaacctggaggtgcacttgaaagtttagtaataaaattgccaattccaaatactgtgagtgatttatcgcctaaaggaattgcgttgcgtctcgatttaattggtgcaactgggacagcgattttattaacagtaattattacaattttaattacgaagttaaaatggaaaagtgcaggtgctttattggtcgaagcaattaaagaattatggttaccgatccttacaatttcagctatcctagctattgctaaagttatgacatacggtggtttgactgtagcaattggacaaggtattgctaaagcgggagcaattttcccattattctctccagtattaggttggattggtgtgtttatgactggttcagttgtaaataacaatactttattcgcacctattcaagcgacagtggcacaacaaatttcaacaagcggttcattacttgtggcagctaacactgcaggtggtgtagcagcgaaacttatttcaccacaatcaattgccattgcgactgcagctgttaaaaaagttggtgaagaatctgcattattaaaaatgacgttaaaatacagtattatatttgttgcttttatttgtgtttggacgtttatactaacgttaatattctaaatataaataatgttgtcacttggattcaaatgacattttaaatctaattattcatgaatcgaactagtacgaaatgcaatgagcatcttgtctagttcgattttttaatgcctaaaaatgtcatatatgtaatcagagtagaaagtgttgaggcgtttcagaagttgtttagaaaagtaagtaaaataaaaaatgcactgagcaacaaaagatgttgctcgtgcatttagatgattcttatcatttcaaataagaatgtgttaatcaacgtatataagttaaaattggtttggataaaatgatatctatcgttgtgtattgtttgtttttatagttcgcgacgacgtccagctaataacgctgcacctaaggctaatgataatccaccaaatacagttgtaccgatgaatggattttcttcaccagtttctggtaatgcttgagctttgttagcatctgcatggtttgctggttgcttcttatcaacaacaagttcttgaccaggtttgatcatgtttttatcagctaatttgttatctgcagcaattttgtcagcagtagtgccgtttgcttttgcaatgtcatttactgtatcaccaggtttaacgacatgtactccgttaccatcttctttaccaggtttgttgccatcttctttgccaggcttgttgccgtcttctttaccaggttttttgttgtcttctttaccaggcttgttgccatcttctttaccaggttttttgttgtcttctttaccaggcttgttgccgtcttctttgccaggcttgttgttgtcttctttaccaggcttgttgttgtcttctttgccaggcttgttattgtcttcctcttttggtgcttgagcatcgtttagctttttagcttctgctaaaatttctttgctcactgaaggatcgtctttaaggctttggatgaagccgttacgttgttcttcagttaagttaggtaaatgtaaaatttcatagaaagcattttgttgttctttgttgaatttgttgtcagcttttggtgcttgagcatcatttagctttttagcttctgctaaaaggttagcgctttggcttgggtcatcttttaggctttggatgaaaccattgcgttgttcttcgtttaagttaggtaaatgtaagatttcatagaaagcattttgttgttctttgttgaatttgttatccgctttcggtgcttgagattcatttaactttttagcttctgacaataggttagcactttggcttgggtcatcttttaagctttggatgaaaccattgcgttgttcttcgtttaagttaggcatattcaagatttcatagaaagcattttgttgttctttgttgaaattgttatcagctttcggtgcttgagattcgtttaattttttagcttcacctaaaacgttagtgctttggcttgggtcgtctttaagactttgaatgaagccgttacgttgcgcttcgtttaagttaggcatgttcaagatttcatagaaggcgctttgttgatctttgttgaagttattttgttgcgcatcagcttttggagcttgagagtcattaagtttttgagcttcacctaaaacgttagcactttggcttggatcatctttaaggctttggataaaaccattgcgttgatcagcatttaagttaggcatatttaagacttgataaaaagcattttgttgagcttcatcgtgttgcgcagcatttgcagcaggtgttacgccaccagatataagtaatgtacctaaagttacagatgcaatacctacacctagtttacgaattgaataaatgtttttctttttcaaattaataccccctgtatgtatttgtaaagtcatcataatataacgaattatgtattgcaatactaaaatctatatttataattaaatttaaaggtaagttttacaacttataaaataaatattttgctgaaatatttattcaggaagtaaaaggcttaaaaccgcaaaatcacgctatttcgattaataaaaacagataaaatatagagatatttttataatgaaagcggtttaatacatatgagttaaaaaatatttttaagaataaagtggggctttgaatgtgctgaggtttaatttcggaaatggttttaagtgatatagaaaatagaaagttgttcattatgtgctgaggttttattaaaaaatagaaaacacaagtgcactttagaatacagcacacttgcgtaatagagatattattcaaaaacaagatgtaaatgatctttatctgctaataattgattcacttgagctaataattgttcagcatggtcttgctgcgcgtcatccatatgaattaaaatttttctttcatcttcagttgagcgttcttttattagatagccttgcttttttaaattattgagagctctaacagtttgagggtatttatggtggattgtttcaattaaatctttaagaagaacgatgtttttattttgagaagtgataatagctagaattgtgaattctacaaaacttaatgttagatgttttttgataatattcttgaaatacattgtatacatcatcaagtttagaaattctttactatcttttggtatcatctgtgattcactttgatctgcaaggttaaattgtttaatgatttgatcaaacaatgtaacacgttctgcaattttctctcgttgttcttcagatattgaaatgtaagtattacgctcatcaattttacttcgaactttactaatatatgaatgtttcacaagtacttttatatgctgtactaaatccgattgtttataacataaatctgaaacaatcttcttaaatggaagtgtgttttcttgttgatgaaataaataagtcagtaatataaattcttttatagtcatatcgacttcaggcttgacttttttcttaaaacgaaacatatatgcttcaatgattataaaatctctaattttgtcatggttattatatttcattgttttatctccttgtatatgcactttattttaatataacacaatataataagaaaaataatccataatttacaattaaaaataatatgatatttttattaaaatttgtgtttttgaataaatgacattatcaaacactatatttaaataagaaatagttatcgatatttgaaaaatcgaagaatattgattgatattatagaatatgagtcggtgttatttgtatataaagtattaatatgtaattaagaaagtcgacgcttgttaacaataacaacaactatatgtataaaaaaacctcgcaacggttagttaactgaatcatttagctaacttcgttgtgaggtcattttgttttaataatatcgttataactttttcacggttaataataagtatatgaagaatggggcaccaaaagcagcaataaatacacctgctggcacttctttaggcaagaataaggtacgcccaattaagtctgcaataacaattgatatggcaccaatcattgctgacattagtaactttttagcataacttccgcgaacgattgttttcgcgatatgtggtgcgattaaaccgacaaacccaatgttacctactaaactgattgccatagatacgagtatagtagaagtgattaattggattagtttcatacgttgtacatgtaagcctaagccaatcgctacagggtcatcaagtatagatattttcatttttggtataacaagaaataacaacggcacaacagctaaaataaccatacccaaaatgattgtatctttaaacgtagcaccgtaaagacttccgactagccatgtataagctttggcagcagataattgcttcgttgtaatgagtaatccttggacaagcgcaataaacaacgtttgcatcgaaataccgatgattatgagtgttgtcgggcgtatttgtcctttcgtttgaaacactaatagtatcatcattgcaactgcgccacctaatactgcaaatagtggaagtaaatgtattgttaaatggctgaaaaatgcaataaagacaacagcacttaagctagcaccacctgtgataccgataatatcaggtgaggcaattggattttttaatacattttgcaacattaaaccactcattcctagtgcggcacctgctaaaatcgcaagtgtaatgcgaggtaagcgtaatacttctaaagtgaattgatccatactgtcatttggatttataaagtacatcagtacgcgttgtaatggtataaagcttgaaccaatcatcatacttaccactgaaacgatggctaaaaagattaacgcgaagatgagatggtaattgtcttttttattaatcttttcggtcataagcgttgacgtcctttcttcataatatagattaagacaatagcgccaatgacagcggtaacgacaccgataggcaactctagtggcttaattattatacgagcaacaatgtctgaaatgatcattaggattgctccagctaatgcagtaaaaggaattaaatacttatagtttggtggtaataatcgtttgctaatattcggtacgataagacccacaaagacgattgatccagctacggctaccgaaataccggctaacatactgatgagcataataatcatccatttgattaattttatgttttgaccgaggccggttgcaatgtcgtcacttgtcatcaagatgttgatgtgtgcagccatgctaaatgcaattaaaataagtatcaatacaagcggaataatccatgggatatcccaaatattacgtaatgaaacggagccacttaaccaaaataataggccttgtaagtctgtttcgttcataataagtatgccttgagtaaaggctgtaaatagcatcgcaatcgcagcacctgccaaaatgacacggtgaggtgagaatagtgtttgtctaaacatacctagtgcaacaactaatacagtaacaacaatagcccccaaaaatgcaataactacaatcattttaaaagattgaatttggataaatgtaatactaaaaatgacaaaaaatactgcgcctgcattgacaccgaaaagccctggtgaggctattgggtttcgtgtaagtgcttgcatcaacaaacctgagacagcaagggcagcaccagtcaataacgcaatgattgttctcgacgcccgtgcaccagtgacaacatcatgtaaatcgttttcactatcaaagttgaataacgcctgtatcaccgtacctggtgacacaagcgtatttccaatcattaaacttaagatagctactattgcaagacataaaccagcaataacgatttggtattttggtttaagtagcatcgtaaaactccttaattattttgattgtttttcaatatttaacttttcatataaatcgtcaataagttttaatgaagatttatatccgccagctaagttccaagtgatttcatctaaatcatcagatacttggttgtttttaactgcgtctaaatttttccactctttacttgaagtccattcgctttcagtctttttaactaatgcagcatctttcgcatttggatctgattttactacaaaaatatgatcagcgttcattaatggaatgctttctttagatgtaagttggataatatctttaccattatcaacttgtttttgtaagtctttattacgtttgaatcctaaatcatttaagatttcaccagcatatccaccagcataaattcttgtatgatcagcacggaagttaacaactgaagctttcaatggccatgcatctttatactttgcttttgcatctttttggaatgcagctactttatcatcgtactttttaagtaaatcttcagcttctttttctttccctaaagctttccccattaacttagttgtatctttgaatttgaaaactgtatcagtagaaactgttggtgcgattttagataattgatcgtaaactttttcatttctaacttttgacgcgacaattaagtccggttttaatttagagatttcctctaagttaggtgcaggttcttgacctacaatcttagtatcttttaaatcattttttatgtattcgaatttcggtttttgtgtccatgattctacagcacctacaggtttaacacctaaagatacagcgacgtcagtggcaccttgatatagcgtaacaacacgctttggtttccctttaatttcagttgtacccattgcatgtttaattgaagttgtttccttatctttgttatcagatgattgtttatttgaattcccactacatcctgctaaaacaagtaggaaagcaagcgtaacaacaagcattttaattactttattcattgactaattagcctccttcgtgatgtatgacaatgagaatcattatcacgatttagtatgaattaaattttttcctaagtcaataaaatatttatgatttacatgcaacttataattatttgacatataaatgcataaaaaatataatcctaattacttgatagtgagaatcattatcaattaggtaacacacaatattatagaattttaaatttgaggaggaagcgcttttgattgaaaaaagtcaagcatgtcacgattcattgttagattctgtagggcaaacacctatggttcaacttcatcaactatttccgaaacatgaagtgtttgcaaagttagagtatatgaatcctggaggcagcatgaaagatcgacctgccaagtacatcattgaacatggtattaaacatggtttaatcactgagaatacacatttaattgaaagtacttctggtaatttaggcattgcgttggcaatgatagctaaaatcaagggattaaaactcacgtgtgttgttgatcctaaaatatcaccaacaaatttgaaaattattaaaagttatggtgccaatgtagaaatggttgaagaacctgatgcacatgggggttatttaatgactcgtattgcaaaggtgcaagaactgttagccactattgacgatgcatattggattaatcaatatgcgaatgagttaaattggcaatcccattatcatggtgcaggcacagagattgttgaaacaattaagcaacctatagattattttgtcgcgccagtcagcacgacaggtagcattatgggtatgagtagaaaaataaaagaagtgcatccaaacgcacaaattgttgctgttgatgcgaaagggtcagtcatttttggtgacaaacctattaatagagaattacctggtatcggtgctagtcgtgtacccgaaatattgaatagatcagaaattaatcaagtgatccatgtagatgattatcaatctgctttgggctgtcgaaaactgattgattatgaaggcatatttgccggaggttcaacaggttcgattattgcagcgattgagcagttgataacgtcaattgaagaaggtgcaacaattgtcacgattttaccagatcgaggcgatcgttacttagatttagtttattcagatacatggttagaaaaaatgaaatcaagacaaggagttaaatcagaatgaatagagagatgttgtatttaaatagatcagatattgaacaagcgggaggtaatcattcacaagtttatgtggacgcattaacagaagcattaacagcccatgcgcacaatgattttgtacaaccgcttaagccgtatttaagacaggatcctgaaaatggacacatcgcagatcgaattattgcaatgccaagtcatatcggtggtgaacacgcaatttcaggtattaagtggataggtagtaagcacgacaatccatcgaaacgtaatatggagcgtgcaagtggcgtcattattttgaatgatccagaaacgaattatccaattgcagttatggaagcaagtttaattagtagtatgcgtactgcagcagtttcagtgattgcagcaaagcatttggctaaaaaaggatttaaagacttaacaatcattggatgcgggctaatcggagacaagcaattacaaagtatgttagagcaattcgatcatattgaacgcgtgtttgtttacgatcaattctctgaagcatgtgcacgctttgttgatagatggcaacaacagcgtccggaaattaattttattgcgacagaaaatgctaaagaagcagtatcaaatggtgaagtagtcattacatgtaccgtaacggatcaaccatacattgaatatgattggttacaaaagggtgcatttattagcaacatttctatcatggatgtgcataaagaagtctttattaaagctgacaaagtcgtagtagatgactggtcacaatgtaatcgagaaaagaaaactattaaccaattggtgttagaaggtaaattcagcaaagaagctcttcatgctgaactaggacaacttgtgacaggtgacataccaggacgtgaagacgatgatgagatcatattacttaatccgatgggtatggctatcgaagatatttcaagtgcttattttatttatcaacaggcacaacaacaaaatattgggacaacattgaacctatattaagaatgcgaggtgtctgaacattgcagaatcatacagcagtcaatacagcacaagcgataatattaagagatttagttgatgcattattatttgaagatatagccggaattgtatcgaatagtgagattactaaagaaaacggacaaacgcttttgatatacgaacgtgaaacacaacaaataaagatacctgtttattttagtgctttaaatatgtttcgttacgaaagttcacaaccaattacgatagagggaagggtgtctaagcaacctttaacggcagctgaattttggcaaacaattgctaatatgaattgtgatctaagtcatgaatgggaagtggctcgcgttgaagaaggactgactactgctgccacacagcttgctaaacaattatcagaattagatttagcgtcacatccttttgtgatgtcagagcagtttgcaagtttaaaagatcgtccatttcatccattagctaaagaaaaaagaggattaagagaagcggattatcaagtgtatcaagctgaattaaatcaatcatttcctttaatggttgcagcagttaaaaagacacatatgattcatggcgatactgcaaatatcgatgaattagaaaatttgacagtacctataaaagaacaagcgacagacatgttaaatgatcaagggttatcaatagatgactatgtactatttccagtacatccttggcaatatcagcatattctgccgaacgtctttgcgaaagagattagtgaaaagttggttgtactattaccgttaaaatttggagattatctgtcgtcttcaagtatgcgttcattaattgatattggcgcaccgtataaccatgtcaaagtaccatttgcaatgcagtcattaggcgcattaaggctaacgcctacgcgttacatgaaaaacggagaacaagcagaacaattattacgtcagcttatagaaaaagatgaagcactagctaagtatgtcatggtttgtgatgaaacagcttggtggtcatatatgggtcaagataatgatattttcaaagatcaattaggtcatctaactgttcagctaagaaagtatcccgaagtgctagccaaaaatgatacgcaacagctagtgtcaatggcagcactcgcggcaaatgatcgcactttatatcaaatgatttgtggaaaagataatatttctaaaaatgatgtcatgacgttatttgaagatatcgcgcaagtctttttaaaggtaacactatcatttatgcaatacggcgcattaccagagttgcatggtcaaaatatattgttgtcatttgaagatggacgtgtacaaaaatgcgtgttacgtgatcatgatactgtcagaatttataaaccatggctaacagcacatcagctttcattgccgaagtatgtcgtcagagaagatacacctaatacgctaattaatgaggatttggaaacattctttgcttattttcaaacattagctgtatcggtaaatctatatgccattattgatgcaattcaagatttatttggtgtaagtgagcatgaacttatgtcgttgttaaaacaaattttaaaaaatgaagtggcaactatttcctgggttacaactgatcagctagctgtcagacacattttatttgataaacagacgtggccattcaaacaaattttattaccattgctatatcaacgtgatagtggtggaggtagtatgccttcaggtttaactaccgtaccaaatccaatggtgacatatgattaatcagtctatatggcgcagtaactttcgcattttatggctcagtcagtttatagcgattgctggactgacagtacttgtgccattattgccaatttatatggcatcactacaaaatctatcagtcgtagaaatacagttgtggagtggtatagcgattgctgctccagctgtaacgacgatgatagcttcgccgatatgggggaagctaggtgataagatcagccgaaaatggatggtgttaagagcgttacttggtttggcggtatgcttatttttaatggcattgtgtacgacaccattacagtttgtacttgtgaggttattgcagggactatttggtggtgttgttgatgcatcaagtgcgtttgcgagtgcagaggcgccagctgaagatcgtggaaaggtattaggaagactgcaaagttcagtcagcgcagggtctcttgtggggccattaattggcggtgttacagcttcgatattaggttttagtgcgttactgatgagtattgccgttattacttttattgtctgtattttcggtgcattaaaattgattgaaacgacacatatgccaaaatcacaaacaccaaatattaataaaggtattcgccgttcatttcaatgtctattatgcacacaacaaacatgtcgatttattatcgttggcgttttagcaaactttgctatgtatggcatgctaactgcattatcaccacttgcttcatcagtgaatcatacagcgatagatgaccgtagtgtgattggatttttacagtccgcattttggacggcttcgatattaagcgcgcctttatggggacgctttaatgataaatcatatgttaaatcagtatatatatttgccacgattgcatgtggttgtagtgcgatactgcaaggtttagcgacgaatatagagtttttaatggctgcaagaatacttcaaggattaacatatagtgcattgattcaaagtgtcatgtttgttgtcgtgaatgcgtgtcatcaacaacttaaaggcacatttgttggaacgacgaacagtatgttagttgttggtcaaattattggcagtcttagtggcgctgccattacaagttatactacaccagctactacgtttatcgttatgggcgtagtatttgcagtaagtagtttatttttaatttgttcaaccatcactaatcaaatcaacgatcacacattaatgaaattatgggagttgaaacaaaaaagtgcaaaataaagaattaatacaacatgcagcgtatgcggctatcgaacgcattttaaatgaatattttagagaagaaaatttatatcaagtaccacctcaaaatcatcaatggtctatacaattatcagagctcgaaactttaacgggtgaatttcgctattggtctgcgatggggcatcatatgtatcatccagaggtatggcttatcgatggaaaaagtaaaaaaataacaacttataaagaagcaattgcgcgtattttgcaacatatggctcaaagtgcagataatcaaacggcagtgcaacaacatatggcgcaaattatgtctgacatcgataatagcattcatcgcacggcacgttatttgcaaagtaacacaatagactacgtagaggatcgttatatcgtttcagaacaatctttatacttaggtcatccatttcatccgactcctaagagtgcaagtgggttttcagaagcagatttagagaaatatgcacccgaatgtcatacatcattccaattgcattatttagctgtgcatcaagatgttctgctcacgcgctatgtagaaggtaaagaagatcaggttgagaaagtgttgtatcaattagcagacatagatatatcagagatacccaaagattttattttattaccaacacatccttatcaaatcaatgtgttgcgacagcatccacagtatatgcaatatagtgaacaaggtttaataaaagaccttggcgtttccggtgattcagtgtacccgacgtcttcggttagaactgtattttcaaaagcattaaacatttatttaaaattaccgatacacgttaaaatcactaattttatacgtacgaatgaccttgaacagattgaacggacaattgatgccgcgcaagttatcgcatcagtcaaagatgaggttgaaacaccccattttaaattgatgtttgaagaaggatatcgtgcattgttaccgaatccattagggcaaacagttgaacctgaaatggatttattaacaaatagtgccatgattgttcgtgaagggataccgaattaccatgctgataaagatattcatgtattggcgtcattatttgaaacgatgcctgattcaccgatgtctaagttatcacaagtgattgagcaaagtggtttagcaccagaagcatggcttgaatgttatttgaatcgtacattattgccgatattaaagctgtttagtaacacaggcattagtctagaagcacatgtacaaaatacattaattgaattaaaagatggcatacccgacgtatgctttgtcagagatcttgaaggcatttgtctatctagaacgattgctactgaaaaacagcttgtgccaaatgttgtggcagcatcaagccctgttgtatatgcacatgatgaagcatggcatcgtcttaaatattacgttgtagtaaatcacttaggacatttagtatcaactattggtaaagcgactagaaatgaagttgtgttatggcaacttgtagcgcatcgtcttatgacttggaaaaaagaatacgcgaataacgcagtatttgttgactgtgtagaagatttatatcaaacgccgaccattgcggctaaagcgaatttgatgagtaaattgaatgattgtggtgcaaaccctatttatacacatataccaaatccaatttgtcataacaaggaggtatcgtattgtgaatcaaacaattcttaatcgtgtaaagactagagtgatgcaccaactggtatcatcacttatttatgagaatattgttgtgtataaagcgtcatatcaagacggtgtcggtcattttacaatagaaggacatgattcagagtatcgttttactgctgaaaagacacatagctttgatcgtatacgtatcacatcaccaattgagcgtgtcgtaggagatgaggcagatacaacaacagactatacacaattattgagagaggttgtatttacatttcctaaaaatgatgaaaagctagaacaatttattgtcgagttattacagacagaattaaaagatacgcaaagtatgcagtatcgagaatcaaacccaccagcaacacctgagacatttaacgactatgaattttatgcgatggaagggcatcagtatcatccaagttacaaatcacgtttaggatttacgttgagtgataatttgaaatttggtcctgattttgtaccaaacgttaaactgcagtggttagctatcgacaaagataaagtagaaacgacggtatcaagaaatgttgtagttaacgaaatgttacgtcaacaagttggcgataagacttatgaacattttgtacagcaaattgaagcatctggcaaacatgtaaatgatgttgagatgatacctgtacacccatggcagtttgaacatgtcatccaagttgatttggctgaagaaaggcttaatggcacagtactatggttaggggaaagtgatgagctatatcaccctcaacaatcgattcgtacgatgtcgccaatagacacgacaaaatattatttaaaggtaccaataagtataacgaacacttcaacgaaacgagtgttggcgcctcatacaattgaaaatgcagcgcaaattacggattggttaaagcagatacagcaacaagatatgtatttaaaagatgaattaaagacagtttttctaggggaagtcttaggacagtcttatttaaatacacaactttcgccttataaacaaactcaagtttatggtgcgttaggtgttatatggcgtgaaaatatatatcatatgttaatcgatgaagaggatgcgataccatttaatgcactttatgcaagtgataaggatggtgtaccattcattgaaaattggattaaacaatatggttctgaagcttggacaaagcaatttttagctgtagcgattcgtccaatgattcatatgctttattatcacggtattgcctttgaatcgcatgcacaaaatatgatgctcattcatgaaaatggttggcctacacgtattgccttaaaagatttccatgatggtgttcgttttaagcgtgagcatttaagtgaagctgcttcacacctgacattaaagccaatgccagaagcacataaaaaagtgaatagtaattcatttattgaaacagatgacgaacgtttagtacgcgactttttacatgatgcatttttctttattaatatcgccgaaatcatcttatttattgaaaagcaatatggtatcgatgaggagctgcaatggcaatgggttaaaggcatcatcgaggcgtatcaagaagcatttccagagttgaataactatcaacatttcgatttgtttgaacctacgattcaagttgaaaagttaacgacacgtcgattattaagtgactccgagttaagaattcatcatgttacaaatccattaggtgtaggaggtatcaatgatgcaacaactatctctgaaacatagattaaacaatggtgattcagtttatggcatttttaattctataccggacccattgatgatcgaggttatcgcagcaagcgggtatgactttgttgtgattgatacagaacacgtggcgattaatgatgagacactagcgcatttaattcgtgcagctgaagcagcgcatattataccaattgtacgtgtcactgcagtgatagatagagatatcattaaagtgttggatatgggtgcgagaggtattattgtgccacacgttaaagatcgtgagacagttgagcatattgtgaaattaagtcgttattacccgcaaggattaagaagtttgaatggtggtcgcatggcaagatttggacgtacaccattacttgatgcaatggagatggctaatgagcatattatggtgattgccatgatagaagatgttgaaggggttatggccattgacgatatagcacaagtcgaaggtttagacatgatagtcgaaggtgccgcagatttatcgcagtcacttggcataccatggcaaacgcgtgatgatcaagtaacatcacatgttcaacatatttttgaagttgtgaatgcacatggtaaacatttttgtgcattaccacgtgaagatgaagatattgcaaaatggcaggcacaaggtgtacaaacatttattttaggtgatgatcgcggaaaaatatatcgccatttaagtgcatctctagcgacgtctaaacagaaaggggatgaaggctaatgcgtatagttcaacctgttattgaacaattaaaagcacaatctcatccagtttgtcattatatctatgatttagtcggactggaacatcatttgcaacatattacatcgtcattgccgagtaattgtcaaatgtactatgcaatgaaagcaaatagtgaacgaaaaatcctagatacaattagtcagtatgttgaaggattcgaagttgcatctcaaggtgaaatagcaaaaggtcttgcttttaaaccagcaaatcatattatttttggtggccctggtaagacagacgaggaactaagatatgcagtaagtgaaggtgttcagcgtattcatgttgaaagtatgcatgaattacaacggctaaatgccatcttagaagatgaagataagacacaacacattttattgcgtgttaatttagcaggaccatttcccaatgcaacgttgcatatggcaggacgcccaacacaatttggtatttctgaagacgaagttgatgatgtcattgaagctgcgctcgcaatgccaaagattcatctagatggatttcattttcattctatttctaacaatttagactcgaatttacatgtcgatgtagtgaaactttattttaaaaaagcaaaggcatggtctgaaaaacatcgatttccactcaaacatatcaatcttggtggtggcataggcgttaactatgcagatttaactaaccaatttgaatgggataattttgtagaacgttttaaaacacttatcgttgagcaagaaatggaagatgtgacattgaactttgaatgtgggcgctttattgtggcacatattggttactatgtgacagaagtgctagacattaagaaagtacatggtgcttggtatgccatattaagaggaggtacgcaacaatttagactgccggtatcttggcaacataaccatccttttgacatttatcgctataaggacaatccatattcatttgaaaaagtttcaatttcgagacaggacacaacgttagtcggtcaattatgtacaccgaaagatgtctttgctagagaagtacagatagacgcaatcagtacaggcgacgttattgttttcaaatatgcaggtgcatacggatggtctatttcacatcacgatttcttaagccatccacatcctgaatttatttatttaacgcaaacaaaggaggatgaataactattgaatcatattcatgaacatttaaaattggtaccagtagataagattgatcttcacgaaacattcgaacctttaagattggaaaaaacgaaaagtagtattgaagcagatgattttatacgtcatcctattttagtgacagcgatgcaacatggtagatatatggttatagatggtgtgcatcggtatacaagtttgaaagcgttaggatgtaagaaagttccagtgcaagaaatccatgaaacacaatattcaattagtacatggcaacataaagttccatttggtgtgtggtgggaaacgttacaacaagaacatcgcttgccatggactactgagacaagacaagaagcgccatttattacaatgtgtcatggtgatacagaacaatatttgtatacaaaagatttaggcgaagcacattttcaagtatgggaaaaggttgtcgcaagttatagtggttgttgttctgtagagagaattgcacaaggtacatatccttgtctttctcaacaagatgtactcatgaagtatcagccattgagttataaggaaattgaagcggttgttcataaaggggaaactgtgccagcaggtgtgacacgctttaatatttcaggacgatgtcttaatcttcaagtaccactggcattacttaaacaagatgatgatgttgaacaactgcgcaattggaagcagtttttagcagataagtttgccaatatgagatgctatactgaaaaagtatacttggtggagcaatagttttactgtgatgttgagggaaatatgatgatttagcgtattgatagcgaaaatataataaaacaatatagtgtggagaacttttgatattttataaatattgaagttctccatttttgtattttgcatataaaaattaaataaaataaggtatattaaggtaaagtataaattttaaataaatggggaatgagtatgagctcaattataggaaaaatagcaatttggataggcatcgtagctcaaatatattttagtgtcgtttttgttaggatgatatctattaatattgctggaggatctgattacgaaacaatttttttattaggattaatattggctcttttcactgttttaccaaccatctttactgcgatttatatggaaagttactctgtaatcggaggtgcactttttattgtttatgctattattgcactgtgtttatataatttcctttcgtcaattttatggctgattggtggtattttgctgatttggaataaatactcaaaagatgaatcgacagacgaaaatgaaaaagttgatattgaaagtacagagaatcaatttgaatctaaagataaaatcactaaagaataaagagaatatttaaggtaaagtataaattttaaataaatggggaatagacatggaaaaaaatgtagaaaaatcattcataaagataggtttatattttcaaatagcttatatagtactcatggctataactttatgtgggtttgtaatttgctatggactaattttcggccttttctatttattatcaggtagcagagctgattatttaatagtaacaatagttatatcggcaataatttctatatttgtaattatactttcaatcgtacctgtcatcgtattggcatctgacttatttaaagaaaggatttcaaaaggtgtcatattaattgtattggctattatcgctttagtattatgcaactttgtatctgcaatactctggtttgtttcagccatatctattttaggtagaaaaaaattagtagctgcagcagatactaccactattcaaaaaagtaaagggaacgcaaatcaagcatcacataaagacacgtgtaaaaaggaacttgatagtcaagacatgatggaacatcctgaggttaaaaatcccacgactaaaaaccttgaaggatttaacgaagaaatacataaagatgaagctacaactaaagttgtcagtgataacacggaaccgcctattgaatcaaaagaccatgtctcgaaaaaagattgatgacaaactaatcgagagacttaaaaaaataatattcaacataagaacttttaaaacgacatttaaacgcattgccaatcactaatggtagtgcgtttaactataccttaaatatctgaatattttgttaaatggagctacctttgttgtactattcaaatgaagaggagtaaaatgtaattaaaggaaagaaatttgaggagtgatctttatgacaaacaacaaagtagcattagtaactggcggagcacaagggattggttttaaaattgcagaacgtttagtggaagatggtttcaaagtagcagttgttgatttcaatgaagaaggggcaaaagcagctgcacttaaattatcaagtgatggtacaaaagctattgctatcaaagcagatgtatcaaaccgtgatgatgtatttaacgcagtaagacaaactgccgcgcaatttggcgatttccatgtcatggttaacaatgccggccttggaccaacaacaccaatcgatacaattactgaagaacagtttaaaacagtatatggcgtgaacgttgcaggtgtgctatggggtattcaagccgcacatgaacaatttaaaaaattcaatcatggcggtaaaattatcaatgcaacatctcaagcaggcgttgagggtaacccaggcttgtctttatattgcagtacaaaattcgcagtgcgaggtttaacacaagtagccgcacaagatttagcgtctgaaggtattactgtgaatgcattcgcacctggtatcgttcaaacaccaatgatggaaagtatcgcagtggcaacagccgaagaagcaggtaaacctgaagcatggggttgggaacaatttacaagtcagattgctttgggcagagtttctcaaccagaagatgtttcaaatgtagtgagcttcttagctggtaaagactctgattacattactggacaaacaattattgtagatggtggtatgagattccgttaataatcatccactaatgataaataaatccttattgttaagtttaatcacttagcagtaaggattttttagtgcacttagaagggagtgtattggtagaaaattaataagcgaagttcttaagtgagttatgatgtcacagtctaatgcatcagttgaaagcattattagtattaacacacccaagatattataaaacatcacaaaaacaccactatctaatttatctcaataaaaattcacaaagttatctcattttatttttataaataaaaaatatcgataaaaagcttacaatactttatgtttttatgatatatttttaatgtataaatgaggtggaagatttggaaagagttttgataactggtggggctggttttattgggtcgcatttagtagatgatttacaacaagattatgatgtttatgttctagataactatagaacaggtaaacgagaaaatattaaaagtttggctgacgatcatgtgtttgaattagatattcgtgaatatgatgcagttgaacaaatcatgaagacatatcaatttgattatgttattcatttagcagcattagttagtgttgctgagtcggttgagaaacctatcttatctcaagaaataaacgtcgtagcaacattaagattgttagaaatcattaaaaaatataataatcatataaaacgttttatctttgcttcgtcagcagctgtttatggtgatcttcctgatttgcctaaaagtgatcaatcattaatcttaccattatcaccatatgcaatagataaatattacggcgaacggacgacattaaattattgttcgttatataacataccaacagcggttgttaaattttttaatgtatttgggccaagacaggatcctaagtcacaatattcaggtgtgatttcaaagatgttcgattcatttgagcataacaagccatttacattttttggtgacggactgcaaactagagattttgtatatgtatatgatgttgttcaatctgtacgcttaattatggaacacaaagatgcaattggacacggttataacattggtacaggcacttttactaatttattagaggtttatcgtattattggtgaattatatggaaaatcagtcgagcatgaatttaaagaagcacgaaaaggagatattaagcattcttatgcagatatttctaacttaaaggcattaggatttgttcctaaatatacagtagaaacaggtttaaaggattactttaattttgaggtagataatattgaagaagttacagctaaagaagtggaaatgtcgtgaaaatgacattgaagctgtccataataataagggttatgcctatcaaagaaaattagacaaactagaagaagtgagaaaaagctattacccaattaaacgtgcgattgacttaattttaagcattgttttattatttttaactttaccgattatggttatattcgccattgctatcgtcatagattcgccaggaaaccctatttatagtcaggttagagttgggaagatgggtaaattaattaaaatatacaaattacgttcgatgtgcaaaaacgcagagaaaaacggtgcgcaatgggctgataaagatgatgatcgtataacaaatgtcgggaagtttattcgtaaaacacgcattgatgaattaccacaactaattaatgttgttaaaggggaaatgagttttattggaccacgcccggaacgtccggaatttgtagaattatttagttcagaagtgataggtttcgagcaaagatgtcttgttacaccagggttaacaggacttgcgcaaattcaaggtggatatgacttaacaccgcaacaaaaactgaaatatgacatgaaatatatacataaaggtagtttaatgatggaactatatatatcaattagaacattgatggttgttattacaggggaaggctcaaggtagtcttaatttacttaataagttcaaataaaagttatattttaaagattgtgaccaattgttacagtataacgaggaatcccttgagacagtatcaaatggcattaagaaatatgtgccatcattgatttgcatggctataaatactattcatctgatgagatagccatgttaagaaattgaaagtatagcattaaaggggtttgtaacagttgaaaattatatattgtattactaaagcagacaatggtggtgcacaaacacatctcattcaactcgccaaccatttttgcgtacacaatgatgtttatgtcattgtaggcaatcatggaccaatgattgaacaactagatgcaagagttaatgtaattattatcgaacatttagtaggtccaattgactttaaacaagatattttagctgtcaaagtgttagcacagttattctcgaaaattaaacctgatgttatccatttacattcttccaaagctggaacggtcggacgaattgcgaagttcatttcgaaatcgaaagacacacgtatagtttttactgcacatggatgggcttttacagagggtgttaaaccagctaaaaaatttctatatttagttatcgaaaaattaatgtcacttattacagatagcattatttgtgtttcagatttcgataaacagttagcgttaaaatatcgatttaatcgattgaaattaaccacaatacataatggtattgcagatgttcccgctgttaagcaaacgctaaaaagccaatcacataacaatattggcgaagtagttggaatgttgcctaataaacaagatttacagattaatgccccgacaaagcatcaatttgttatgattgcaagatttgcttatccaaaattgccacaaaatctaatcgcggcaatagagatattgaaattacataacagtaatcatgcgcattttacatttataggcgatggacctacattaaatgattgtcagcaacaagttgtacaagctgggttagaaaatgatgtcacatttttgggcaatgtcattaatgcgagtcatttattatcacaatacgatacgtttattttaataagtaagcatgaaggtttgccaattagcattatagaagctatggctacaggtttgcctgttatagccagtcatgttggcggtatttcagaattagtagctgataatggtatatgtatgatgaacaaccaacccgaaactattgctaaagtcctggaaaaatatttaatagacagtgattacatcaaaatgagtaatcaatctagaaaacgttatttagaatgttttactgaggagaaaatgattaaagaagtggaagacgtttataatggaaaatcaacacaatagtaaattactaacattgttacttatcggtttagcggtttttattcagcaatcttcggttattgccggtgtgaatgtttctatagctgactttatcacattactaatattagtttatttactgtttttcgctaaccatttattaaaggcaaatcattttttacagtttttcattattttgtatacatatcgtatgattattacgctttgtttgctattttttgatgatttgatatttattacggttaaggaagttcttgcatctacagttaaatatgcatttgtagtcatttatttctatttagggatgatcatctttaagttaggtaatagcaaaaaagtgatcgttacctcttatattataagcagtgtgactataggtctattttgtattatagctggtttgaacaagtcccctttactaatgaaattgttatattttgatgaaatacgttcaaaaggattaatgaatgaccctaactatttcgcgatgacacagattattacattggtacttgcttacaagtatattcataattacatattcaaggtccttgcatgtggtattttgctatggtctttaactacaacggggtctaagactgcgtttatcatattaatcgtcttagccatttatttctttattaaaaagttatttagtagaaatgcggtaagtgttgtgagtatgtcagtgattatgctgatattactttgttttaccttttataatatcaactactatttattccaattaagcgaccttgatgccttaccgtcattagatcgaatggcgtctatttttgaagagggctttgcatcattaaatgatagtgggtctgagcgaagtgttgtatggataaatgccatttcagtaattaaatatacactaggttttggtgtcggattagtggattatgtacatattggctcgcaaattaatggtattttacttgttgcccataatacatatttgcagatctttgcggaatggggcattttattcggtgcattatttatcatatttatgctttatttactgtttgaattatttagatttaacatttctgggaaaaatgtaacagcaattgttgtaatgttgacgatgctgatttactttttaacagtatcatttaataactcaagatatgtcgcttttattttaggaattatcgtctttattgttcaatatgaaaagatggaaagggatcgtaatgaagagtgattcactaaaagaaaatattatttatcaagggctataccaattgattagaacgatgacaccactgattacaatacccattatttcacgtgcatttggtcccagtggtgtgggtattgtttcattttctttcaatatcgtgcaatactttttgatgattgcaagtgttggcgttcagttatattttaatagagttatcgcgaagtccgttaacgacaaacggcaattgtcacagcagttttgggatatctttgtcagtaaattatttttagcgttaacagtttttgcgatgtatatggtcgtaattactatatttattgatgattactatcttattttcctactacaaggaatctatattataggtgcagcactcgatatttcatggttttatgctggaactgaaaagtttaaaattcctagcctcagtaatattgttgcgtctggtattgtattaagtgtagttgttatttttgtcaaagatcaatcagatttatcattgtatgtatttactattgctattgtgacggtattaaaccaattacctttgtttatctatttaaaacgatacattagctttgtttcggttaattggatacacgtctggcaattgtttcgttcgtcattagcatacttattaccaaatggacagctcaacttatatactagtatttcttgcgttgttcttggtttagtaggtacataccaacaagttggtatcttttctaacgcatttaatattttaacggtcgcaatcataatgattaatacatttgatcttgtaatgattccgcgtattaccaaaatgtctatccagcaatcacatagtttaactaaaacgttagctaataatatgaatattcaattgatattaacaatacctatggtctttggtttaattgcaattatgccatcattttatttatggttctttggtgaggaattcgcatcaactgtcccattgatgaccattttagcgatacttgtattaatcattcctttaaatatgttgataagcaggcaatatttattaatagtgaataaaataagattatataatgcgtcaattactattggtgcagtgataaacctagtattatgtattattttgatatatttttatggaatttacggtgctgctattgcgcgtttaattacagagtttttcttgctcatttggcgatttattgatattactaaaatcaatgtgaagttgaatattgtaagtacgattcaatgtgtcattgctgctgttatgatgtttattgtgcttggtgtggtcaatcattatttgccccctacaatgtacgctacgctgctattaattgcgattggtatagtagtttatcttttattaatgatgactatgaaaaatcaatacgtatggcaaatattgaggcatcttcgacataaaacaatttaagtaccggtaatgctatactttagaaaattaagattaagaagaaaaggcaatttcttattgaaaaatggaagttgtcttttttaattctctttaaaagcgggaaacaaaagcagttaaatgcctttttgcattcaatattaaatattatatcaatttcgaatatttaaattttatataattggatataacaaataaataataattattgcaaaacacacccgaaattaattattataaaagtatattcataaaaggaggaatatacttatggcatttaaattaccaaatttaccatatgcatatgatgcattggaaccatatatagatcaaagaacaatggagtttcatcacgacaaacatcacaatacgtacgtgacgaaattaaacgcaacagttgaaggaacagagttagagcatcaatcactagcggatatgattgctaacttagacaaggtaccggaagcgatgaggatgtcagtccgtaataatggcggtggtcattttaaccattcattattctgggaaatactatcacctaattctgaagaaaaaggtggcgtaatagatgacatcaaagcgcagtggggcactttagatgaatttaaaaatgaatttgcaaataaagcaacaacattatttggatcaggttggacttggttagttgttaatgatggcaaattagaaattgtgacaacgccaaaccaagataatccattaacagaaggcaaaacaccaatcttactatttgatgtttgggagcatgcctactatctgaaatatcaaaataaacgtccagactatatgactgcattttggaacattgttaactggaaaaaagttgatgaattataccaagcagcaaaataatataacttaatataattgaggtggagcatctacaaggtgttccacttttttgtacttaatatctttacttatttgtttttgtgtaatgggatagcacgtaaaagtggaaaaataataagataaatttcaactcgaaataccttattattgttgactataacgatgacctaaatattatatacattagacaacactattaattaatcaacatattgacattaaataaattgacaaaataagtaattattgtgaatctaaagtgaaatttttataaaaaaatgtaatgattcaaaaattttgttgcatttcttttgtaatcgtatgataatgtaaatgtaatcaaattgtaatataaggggacaagacaatgaaaaaattagcaacagtaggttctttaattgtaacaagcactttagtattctcaagtatgccttttcaaaatgcgcatgccgacacaacttcaatgaatgtgtcgaataaacaaagccaaaatgtacaaaatcatcgtccttatggcggagtagtaccacaaggaatgacgcaagcacaatatactgaattagagaaagctttaccccaattaagcgctggcagtaatatgcaagactataatatgaaattgtatgatgcgacgcaaaatattgctgataaatacaatgtgataattacaactaatgtaggggtatttaaaccacatgctgttagagatatgaatggccatgcgttacctttaacaaaagatggcaatttttatcaaacgaatgtagatgcaaatggtgttaatcatggtggtagtgaaatggtgcaaaataaaacaggtcatatgagtcaacaaggccatatgaatcagaacacacacatgaaccaacagccacacatgcaacaaggtcatatgcaatcatcaaaccatcaaatgatgagtccaaaagcaaatatgcattcatcaaatcatcaaatgaaccaaagtaacaaaaaagttttaccagctgctggtgaaagtatgacatcaagtattcttactgcaagtattgccgcactactattagtatctgggttattcttagcatttagacgacgttcaacaaataaataaacataatacgattaataatagaaaaatcgtgtgattatctgagcgagcctaggacataaatcaatgtcctaggctcgctaatgttatattggcagtagttgactgaatgaaattgcgcttgtaacaagcttttccatttcttaccaactccctaaatagtcatcaaaaaatttcttatattttaataatttttaataatccgattgtcttatacgtgtcagtgttaattcagatatttcctgtggaatataccacttattaatcataattggataaggtgtttgtgcgtacagtgtttcaataatcagccaacaatgtgtatcaccatcaaacacgtgactatgatttttgaagtggggcgctttggtaatagacatttttaaatctgattgatatgcattgctataaatcgtttgctcaacgaatgtcttcatgtcgtcttcgttttgtgtattcactttaaatgtgtcaatgacatttaacggtataaaggtaaagcaaaatgcatcagcttgcttagaatgattgtcctttttttgataatagcgttccattgcaatgacggcagaaggatggtttgcaaacaaatgatttgtatattcactttctaaatcaacacgataattaattgatgacatagatacgcgagctagcaatatttgatcaagtggatgcttaaattgatccatacttgaagcgtgttgggcatttgtttgtggaataacaaagtgtcccttccctcttgtactctctacgatgccatcttcggctaacaattttatagcttggcgcaaagtcatacgactgacatcaaagcgcgcacaaagttccttttcagtaggtaatgcatggccactcggatattttcctatttgaatttctttatataacgtattataaatcgttaaaaattttggttgtgtttgcgtcacgtagacaacctccataaagttacttaatcactctcatcatacaataatttttactcaaattggaaaaattataaaaattaaatatagataggctttgaaaattagttttatacaaggttagtagctgtaactgtaaaatgttcttaatattgtcaaaatgtaatgcttgaaagcgcttttaaaaaatattattatatacatggttagacaaatagacaaatcactatacaaatattgggaggaatattttatgaaatcaacaccacacattaaaccaatgaatgacgtcgaaattgcagaaacggttctattgccaggagatccgttaagagctaagttcattgcagaaacttatttggatgatgtggaacagttcaatacagtgcgaaacatgtttggttttaccggaacatataaaggtaaaaaagtttctgtcatgggttcaggtatgggtatgccatctattggcatttactcttatgaattaattcatacatttggttgtaaaaaattaattcgcgttggctcttgtggcgcgatgcaagaaaacattgatttatatgatgtgattattgcacaaggtgcctctactgattcaaattacgttcaacaatatcaattaccaggtcattttgcgccaattgcttcttatcaattattagaaaaagcagttgaaacagcacgtgacaaaggtgtacgtcatcatgtaggtaatgtgttatcaagtgatattttctataacgcggatacaacagcgagtgaacgttggatgcgtatgggtattttaggtgtagaaatggaatcagctgcattatacatgaatgcaatttacgctggtgtcgaagcattaggtgtgttcacagtgagcgatcatttaattcatgaaacgtcaacaacacctgaggaaagggaacgtgcatttacagatatgattgaaattgcactgtcattggtgtagatgattatgaatgttgaatattctaaaataaagaaagcagtacctattttattattcttatttgtattcagtttggttatagacaactcatttaaattgatttctgtagccattgctgatgacttaaacatatctgtaacgacagtaagttggcaagcgacattagccggtttagtaattggtattggcgctgtagtatacgcttcattatctgatgccattagtatacgcacactatttatttatggcgtgatattaatcattatcggatcaattattggttacattttccaacatcaattcccattacttttagttggacgtattattcaaactgccggtttagctgctgcagagacattatatgtgatatatgttgcaaagtatctttctaaagaggaccagaagacttaccttggcttaagtacgagcagttattccttgtcattagttatcggtacattatcaggtggatttatttctacgtatttacactggacaaatatgtttttaattgcattaatcgtagtatttacgttgccattcctatttaaattattaccaaaagaaaataatacgaataaagctcatttagattttgttggcttaattctagtggcaactattgctacaacagtcatgctgtttattacgaactttaattggttatatatgattggtgccttaattgcgattatcgtttttgcgctatatattaaaaatgcgcaacgtccattagtaaataaatcatttttccaaaataaacgttatgcttcatttttatttatagtatttgtaatgtatgctatccaattgggttatatttttacgttcccattcataatggagcaaatttatcatctgcaactagacacaacatcactgttattagtaccgggttatatagtagcagtcattgttggtgcactaagtggtaaaatcggcgaatatctgaattcaaaacaagcgattatcacagcaattattttaatagcactgagcttgattttacctgcatttgcagtaggtaatcacatttcaatcttcgtcatttctatgatattctttgcaggtagctttgctttaatgtatgcacctttacttaacgaagccattaaaacaatagatcttaatatgacaggtgtggctattggtttttataatttaattattaatgtggcggtatctgtaggtattgcgattgctgcggctctaatcgattttaaagcattaaatttcccaggcaatgatgcattaagttcacatttcggtattattttaattattttaggtttaatgagtattgtcggattagttttattcgtcagcttaaatcgttggacacaatctgaaaaataaatagatataaattcgcgagatatattcgtatttatagtaaaattaaataaagagattatataacacgaggagtagtaagtatgaaatttgagaaatatatagatcacactttattgaagcctgagtcaacacgtacgcaaatcgatcaaatcatcgatgaagcgaaagcatacaattttaaatctgtatgtgtgaatccaacacatgttaaatatgcagcagagcgactagctgattcagaggtgctcgtttgtacggtaataggattcccattaggtgcgtcgacaactgcaacgaaagcatttgaaacagaagatgcaattcaaaatggtgcagatgaaattgacatggtcatcaacatcggcgcattaaaagatggacgttttgatgatgtacaacaagacattgaagcagtggttaaagctgcgaaaggtcacacagtaaaagtgattattgagacggtattgttggaccatgacgaaattgtaaaagcgagtgaattaacaaaaacggctggtgcggacttcgttaaaacttcaacaggttttgcaggtggcggtgcgactgcagaagacgttaaattaatgaaagatacagtaggtgctgatgtagaagtaaaagcatcaggtggcgtacgtaatttagaagatttcaataaaatggttgaagcaggtgcgacacgtattggtgcgagcgcaggtgttcaaattatgcaaggtttagaagcagattcagattactaatatatataaattttgggagtgatagctatgacaagaccatttaatcgtgtacatttaatcgtaatggattcagtaggtattggtgaagcgccagacgcagctgattttaaagatgaaggttcacatactttaagacataccttagaaggtttcgatcaaactttaccaaaccttgaaaagttaggtctagggaacatcgataaattaccagtagtaaatgcagttgaacaaccagaagcatactatactaaattgagtgaagcttcagttggtaaagatacaatgactggtcactgggaaattatgggattaaatattatgcaaccttttaaagtataccctaatggattccctgaagagttaattcaacaaattgaagaaatgacaggtcgtaaagttgttgctaacaaaccggcatcgggtacgcaaattatcgatgagtggggcgagcaccaaatgaaaactggtgacttaattgtttatacaagtgcagacccagtattgcaaattgctgcacatgaagacattatcccattagaagagttatatgatatttgtgaaaaggttcgtgagttgacaaaagaccctaaatatttaattggtcgtattatcgcacgtccatatgttggtgaaccaggaaactttacacgtacatctaatcgacatgactatgcgttaaaaccttttggtaaaactgtcttagatcatttgaaagacggtggttatgatgttattgccatcggtaaaattaatgacatttatgatggtgaaggtgtaacagaagcggttcgtacgaagagtaacatggacggtatggatcaattgatgaaaattgttaagaaagatttcacaggtattagcttcttaaacttagtagactttgatgcattatacggtcatcgtcgtgataaaccaggttatgcacaagcaattaaagatttcgatgatcgcttgccagaactgtttagcaacttaaaagaagacgatttagtaattattacagcagaccatggtaatgacccgacagcgccaggtacggaccatacgagagaatatatcccagtaattatgtacagtccgaaatttaaaggtggtcatgcactagaaagtgatactacattcagttctatcggtgcaactatagcagataatttcaacgtaacattaccagagttcggtaaaagttatttaaaggaattgaaatagaataaatttagatattataaaaacagcagtgaagttaactataacaatagttttcttcactgctgtttttattataatagagaaacgtaagacggtaggacttcttatttaggagtatcctgatttaatgttaaacaatacgttttcggattgaaccggaaattaaatcgacaattgcgaccattagtactaaaccgattaatataatacctacacggtcccaagaacgtgtttgaatggcaaatatgagtggtgtcccgataccaccagccccaattagccccagtatagaagctgaacgtaagtttagttcaaagcgataaagtatgagtgatagaaaggcaggcataatttgtggtatgactgcaaatacgagtgttttaatcttattcgcaccactggcctttaatgattctacagcactgaaatctagaccttcaatatcttcagctaaaagtttcccaagcatacctacggaatggatacctaaagctaatacacctgaaaatgaacctgggccaacagctttgataaatataagtgccattacaatttctgggaagacacgtataacacttaaaataaatttgctaacacctgaaactgggcgtagctttaccatattatttgcacctagaaatgctaatggaatacagataattgcggcgatgaaagtacctacaacggctatcgcaaaggtttcaagtaaaccacgtaataagtcttcgccatctggtatatagatatagctgatatcaggatggaataatccgctgaatatggattttaagatttctaatgatttacttttaagttctaaacttggtacacctgcaaatgcccagatgataatagctaagacgacaattgcaataagccatcttttaatcaattttcgtttgtgtgcttttgtgtgaacattatattttgctatttcctgtgtcatgcgagatgtgccctcactttcgtactgatgtaatcaatgacgacgacgataactaaagtaaataaaataatcgttgctgtttttggatattgaaataaaccaagtgtttgatcataaaacaatccaataccgccagcgccgactaatccaagcacagctgaagcacgtatatttacttcaaatgcatataatacgtatgacataaatgacgatatggcttgtggtacaacaccgaaaacaatccattttattttattagcgccaacagccgtcattgcttccattggacctggatctatcgtttccaatgattcatataataattttccaataatacagatagttaaaataaacagtgctaatatccctggaatttgaccgattccaaatacagccacaaagattgctgctaataacaaatctggaatagtacgaactatatttaaaataaagcgcgagggtattgaaatccacttttgatgaacgatattgctagcacataataacgcaattggtattgaaacgatgctacctaatactgtacttacgatagccattcgaatggtatctaacattggcgttgtaatttgttgtaaatactcgaaatcaggtggaatcatttgtttgaatagatcacctatttgaggtattcctatcattaaatctccaaaattaaatcccgtataaatgaagctccaaatgataagcacaatgattaacatgaaggtaaaactcgtttttaaagaaacctttttctttaaaagggagtcatactttgtaggtatttctaaaggcatgttagttcactcctagcttttcatcttctttaattgtacgtccatatatttcactaaatacgtcatctgttgcttcagatgcaggaccatcatagacaacttcaccatcacgtaaaccaatgatgcgtgtgccatattcttttgccaagtcaacaaaatgtaaattaattaaaattgtgatgcctaattcttggttgatttttcttaaatcatccataacctgtttcgtagttaatgggtctaatgaagcaactggttcatctgcaagaataatttcagattcttggcatagcgcacgtgcaatagatatacgttgttgttggccacctgataattcatcagagcgttgattatatttatctaagatattgacgcgttctagtgcatccattgccttaattttgtcttcttttgggaataaacctaataccattttccaagtagggtgataacctacacgtccacttagtacatttcgtaatacacttgaccgtttaactaaattaaaatgttggaaaatcatacctatatttcggcgcatttctaataatgctttaccatgggctttagtgattgatttaccttggatgaaaatttcacctgacgtgatatcatgcaaacgatttacagatcttaataacgtggatttcccagcaccagatagtccgacaataactgcaaattcacctttttcaatatttaagttaatatttttcaagcctacatgaccgttaggatagactttactgacgtttttaaattcgatttgactcatgtttgacacctttctttaataaagaaaagccaaggtaaactgaaatatcatagacattgggtttctgtgtacaaatggtttcaaatgtacagcgacacctttctatatctgtttcagtttagcgcctagcttttcaatattaatctagaatatatctattgaacgaaagcttttaataccaaattcgctaatgattcatttgttaaataatgattatttcatatctttaactaatttttcgtactctcttacaatgtcgaaatttgaatctttcgtttctgtgtatccttcatgtgaataaacttcgctaataattttgtgaccttcttttgatttagcaatgtctataaaagcttttttcaatttttcttgaaaatctttatccatatctggtcttacagaaattgtgtcattcggaatagcttgtgttaattttaaaattcgtgtgtctttaaatacatttggttggtcttttttcacagtattacgtgcatcgttaaatacagccgcagcatctacatctccatttaataatgagataactgcttggtcatgacctttaacattcacaattttcatatctttagttgcattaatacctgcttcgttttttaacatcgcaagtgggaatgtatatccagcagttgatgttacatcttgtaaggcaattttcttaccttttaaatctttcaagcttttaatttttgagtcttttttaacaagaatttctgatttataactatctacaagttctttacttgctgaaccatcttcttttacaccgaaacgttgtgcttgtaataataaatcagctgctttttgatcatgtgctaatgtgtatgccgttggtggtaagaaaccaacatcaacttttttagacttcatagcttcaacaattgtattgtagttagttgatacagacactttaactggaatccctaattctttagatagtaatttttctaatggttttgctttagcttctaatgttccagcattttgcgaaggtacaaattgaacggttaattctttaggtttgtatcctcctgatttagaatccgaatcattactagcgttcttttgattatctaaagaacttgagtttccacatgctgctgcaaaaacaatgactgctaacattaatacaaataaacacttaaaatttttcatttgataactgtccccttcacattcttaatcgtgtaatatgtatgcaatgaaattacacttatagcgtaccacatttaaatgttaaaaagtattttataaaaatgaattttaataactttctttaagagtttgataagattttgtaaatttttcgttaaattgctcatatgcaacgaatttttatcctataattcaagaacaaatttattttaaaaggagcctcacaaaatgaaaaaaatatataagtcattaactgtctctgcaattgttgcaacggtatcattaagtgctttaccgcaatctttagctataacgcatgaatcgcaacctacaaagcaacagcgaacggtattattcgatcgttctcatggtcaaacagctggtgctgcagattgggttagtgatggtgcattttcagattatgcggattcaatacaaaaacaaggttatgacgttaaagctattgatggtcattcgaacataacagaagcaagtttgaaaagttccaaaatatttgtaattcctgaggctaacattcctttcaaagaatcagaacaggcagcaattgttaaatatgtgaaacaaggtggcaatgttgtctttatttcagatcattacaatgctgaccgaaatttaaatcgtattgattcatcggaggcaatgaatggttatcgacgtggagcatatgaagatatgtcgaaaggtatgaatgcagaagaaaaaagttctactgcaatgcaaggtgtgaaaagttcagattggttatctacaaactttggcgtacgttttcgatataatgcactaggtgatttaaatacgagcaatattgtttcttcaaaagaaagtttcggtattactgaaggtgtgaaatctgtctctatgcatgccggatcgacattagcaattactaatccagagaaagcaaaaggtattgtgtatacaccagaacaattgccagcgaaaagtaaatggtcacatgctgtagatcaaggtatttataatgggggcggtaaagcagaaggcccctatgtagcaatttctaaagttggaaaaggtaaagcagcatttatcggtgattcatcacttgtggaagatagttcgcccaaatatgtaagagaagataatggagaaaagaagaaaacatatgatggttttaaagaacaagacaacggtaagctattaaataatataacggcttggatgtctaaagataatgatgggaaatcacttaaggcgagtagcctaacattagatacaaagactaagttgcttgattttgaacgaccagagcgttcaactgagcctgaaaaagagccatggtcacaaccgccgagtggttataaatggtatgatccaacaacatttaaagcaggtagttatggcagcgaaaaaggcgcagatcctcagccaaacacaccagatgatcatacaccaccaaatcagaacgaaaaagtaacatttgatatcccgcaaaatgtttctgtaaatgagccatttgaaatgacaatacatttaaaaggatttgaagcaaatcaaacacttgaaaatcttagagttggtatttacaaagaaggcggacgtcaaatcggacaattttcaagtaaagataacgattataacccaccaggttacagtactttgccaacagttaaagcagatgaaaacggaaatgtcacaattaaggtcaatgctaaagtacttgaaagtatggaaggttcaaagattcgtttaaaactcggtgacaaaaccttgattacaacagacttcaaataaatatataatagaaataagaaagatgtttgtgattgaaggagtgagtgaggatgtcaaacatagcattttatgtcgtgagtgacgtacatggttatattttcccaacagattttacgagtagaaatcaatatcaacctatgggattgttactagcgaatcatgttatagaacaagacagaaggcagtatgaccaaagttttaaaatagataatggtgattttttgcaagggtcaccattttgtaattacttaatcgcgcatagcggcagtagccagcctttagttgatttttataatcgaatggcattcgactttggtacgcttggtaatcatgaatttaattatggattaccatacttaaaagacactttacgcagactcaattatccagttttgtgcgctaatatatatgaaaatgatagtacattgactgataacggtgtgaagtattttcaggttggagatcaaactgttggtgtgataggtttaacgacacaatttattccccattgggaacaaccagagcatattcagtcacttacgtttcatagtgcttttgaaatacttcaacaatacttacctgaaatgaagcgacatgcagatatcattgtggtttgttaccatggtggatttgaaaaggatttagaaagtggtacgccgaccgaagtattaacgggtgaaaatgaaggatatgccatgttagaagcgttttctaaagatatagatatctttattacgggtcaccaacatcgacaaattgctgaaaggtttaagcaaacggctgtgattcaacctggtacgagaggtacaactgtaggcagagtagtcttgagtactgatgaatatgaaaatctatccgttgaatcatgtgaattacttcctgttatagatgattccacatttactattgatgaagatgaccaacatttacgaaagcagttagaggactggttagattacgaaattactacattgccatatgatatgacgattaatcatgcatttgaggcacgtgtggcaccgcatccttttacaaattttatgaattacgctttattagaaaaaagtgacgcagatgttgcctgtacagctttgtttgattctgctagtggtttcaagcaagtcgtgacgatgcgagatgttattaacaattacccatttccaaatacatttaaagttttagctgtaagtggtgccaaacttaaagaagccattgaacgatcagcagaatattttgacgtgaaaaatgatgaagttagtgtgagcgcagacttccttgaacccaaaccacaacactttaattatgatatatatggtggcgtaagttataccattcatgttggaagaccaaagggacaacgtgtgagcaatatgatgattcaaggtcacgcagttgatttaaagcagacatatacaatttgtgtaaataattatcgtgcagtaggcggtggtcagtatgatatgtatatcgacgcgccagttgtaaaagatattcaagttgaaggcgcacaattacttattgattttttatcaaataataatttgatgcgcatcccgcaagttgttgattttaaagttgaaaagtgacggatatatgtaaaacttacttgattttaatcgggtaagtttttgtttttgtttaaagcgagaaagtattatctttagacgacgtgattgaaatgtcacgtcctgtcaaaatgaatagtttattaaagttgtattttgatagaaatttactgacaccacaaaaattattgaattatttaaaagttgatgaaacatttttgaatcatctagcaggtattaatttaaaactctttaaggattatgttaatgaaaatagagaatataatataacgaatctatataaataaggcaccaatatttaaacctcgagctgaaaagatcatcatttcagttcgaggttttttattttatcctctttgtatgggtattcttttacttgaaatttgttttcctgtttttttattgtaaatttttattacatagtatcctaagttatatcctgacatttgttctccagtatttttagttttttagtaggaacataatggtatttttttgctgttagtggaacatattttttagtgttttgaatttcgtttcatccatttgtaaaactggatactctaatatccggtaatagccggttaaatcgacataggatgtcactagctattccaaaattgtcttttgacgctataacgattgttgggaatcttagcatgtctaacgcagagagactttcacattttatgagtactaatcctgaaattcggctttgggatattttacaaacaaactttaaagctaaagctcttaaagaaaaagtttatattgaatatgacaaaataaaagcaactctttggaatagacgtagtatgcgcgttgaatttaatcctaataagctttcgcatgatgaagtgctttggttaaaacaaaatatcatcagttatttggacgatgttagttttacgagattagatttggcttttgattttgaatttgatttaaatgactattatgcattgtcagataagtcggtaaagaaaactatattttatggacgtaatgtaaaaccagaaacaaaatattttggtgtgcgtaatagtgataggtttattcggatttataataaaaacaagaacgtaaagataatgcagatgttgaaattgattcaacatttctatggcgtgtggaaattgaattaaaacgagatatggttgattgttggaaagattgttttgatgatttgcatattttaaaaccgaatttaaaaatgattgaaaatatacaagaacgagcaatgcttcatttattaactcacgaagaagaggaatggggaaatttagaaagacgtactaaaaataaatatagagataagttgaaaaatatagcgtctattgatttgacagatttaatgaaaatatctttaagaggaaatgaaaaccaattgcaaaaacaaatcgacttttggttgaattaattattataactaaagaactatgttcacttatgctcatctacttaaaataagtatttttttgttggtttttaaaagtagttgaaatgtttataataatattgaaagatatttctgttttccttttgaataataaacttaaaagagaatataaaataatgcttattaaaattaggggtggaaatatgaaaagagatttttttgaaaagtggtcgtttattttaaatttaattttattttgtgcttttttgtttttagtggttctgatgttttataaggatgtcgatttgatttatattttttgtacattattaatatcattattacctttgctaaatattataaaaagatataagaaaaagacggataattaatccgtcttttttttatgaaaagaataggctgggaaataaatcaatgttctatgatctacgaagttatattggcagtaattgactgaacgaaaatgcgcttgtaataagcttttttcaattctagtcaggggccccaacacagagaatttcgaaaagaaattctacaggcaatgcgagttggggcggggccccaacaaagagaaattggattcccaatttctacagacaatgcaagttggggtgggacggcgaaataaattttgcgaaaatatcatttctgtcccactccccagaaaaggttctaccattgtcaaaaaaatgcatctctacatgttagagtaaatattggtcagccaaccaaaataatcaacacgaggagatgctatttaatgtcatctgacacaaacagtttagcacatacgaaatggaattgtaagtaacatattgtctttgcacctaaatacagaagacaagcgatatatggaaaaataaaaaaagatatagggattatattacgtcaattatatgaaagaaaaggtgtagagataattgaagcagaggtatgtaaagatcatatccatatgttagttagtataccacccaaacttggggtatcatcatttgttggctatttaaaaggaaaagtaatttaatgatatttgatagacatgctaacttaaagtatagatatggaaatagaaagttttggtgtaaaggattttatgtggatacagtaggtagaaataaaaaagtgattgaaaattatattcgtaatcaattacaagaggatatcgttgcagatgaaatttcaatggaagaatatttagatcctttcactggagagaaaaataaaaaaagaaagaaaaaagagtaaacctttaggattgctggaatagtagtgcagttggctgacttgtcagtgcccttttagggctggccagtaaggaaggcttatagccgcagaacaaaccacccgttcacacgggtggtttttatttgtaacatctgttgataggtatcgacaaggaccttttaatgttgtgttttgtgcgatataacaagctttttaggctattaaagaatattcagaattaaatatataattatgaataaattatgtcattgaaaaaattatgattataaaatcattctaaaaacaccgaaataacaatgatttcatgaaaacatttattttaaaatttgatatttgttcaaataatattcgaaattaaacttttttgtatagaattttctttatatcctgagagacatgtactataatgtttgtgaaataattcacaaagtataaaggagtggttgtatatgttaactatacctgaaaaagaaaatcgtggatcgaaagaacaagaagtggcaattatgattgatgctctagctgacaaagggaaaaaagcattagaagcattatctaaaaagtcacaagaagaaattgatcatattgttcatcaaatgagcttagcagctgttgatcaacatatggtgctagcaaaattagcacatgaagaaactggaagaggtatatacgaagataaagcgattaaaaatttatacgcttctgaatatatatggaattcaataaaagacaataagacagtagggattattggtgaagataaagaaaaaggattaacgtatgtagcggaaccaattggtgttatttgtggtgttacgccaacaacaaatcctacgtcgacaactatttttaaagcgatgattgcaattaagacaggaaatccaatcatttttgcattccatccaagtgcacaagaatcgtcgaagcgtgcagcagaagttgtattagaagcggcaatgaaggcaggtgcacctaaagatattattcagtggattgaagtgccttctatcgaagcaacaaaacaattaatgaatcacaaaggtattgcattagttctagcaacaggtggttcgggcatggttaagtctgcatattcaactggcaaaccggcattaggtgtgggaccaggtaacgtgccgtcttacattgaaaaaacagcacacattaaacgtgcagtaaatgatatcattggttcaaaaacatttgataatggtatgatttgtgcttctgaacaagttgtagtcattgataaagaaatttataaagatgttactaatgaatttaaagcacatcaagcatactttgttaaaaaagatgaattacaacgcttagaaaatgcaattatgaatgaacaaaaaacaggtattaagcctgatattgtcggtaaatctgcagttgaaatagctgaattagcaggtatacctgtccccgaaaatacaaaacttatcatagccgaaattagcggtgtaggttcagactatccgttatctcgtgaaaaattatctccagtattagccttagtaaaagcccaatctacaaaacaagcatttcaaatttgtgaagacacactacattttggtggattaggacacacagccgttatccatacagaagatgaaacattacaaaaagattttggactaagaatgaaagcttgtcgtgtacttgtaaatacaccatcagcggttggaggtattggtgatatgtataacgaattgattccgtctttaacattaggttgtggttcctacggtagaaactcaatttcacataatgttagtgcgacagatttattaaacattaaaacgattgctaaacgacgtaataatactcaaattttcaaggtgcctgctcaaatttattttgaagaaaatgcaatcatgagtctaacaacaatggacaagattgaaaaagtgatgattgtctgtgaccctggtatggtagaattcggttatacaaaaacagttgagaatgtattaagacaaaaaacggaacagcctcaaattaaaatatttagcgaagtcgaaccgaacccatcaactaatacagtatataaaggtctggaaatgatggttgatttccaaccggatacaatcattgcacttggtggtggttcagcgatggatgctgcaaaagcaatgtggatgttctttgaacaccctgagacatcattcttcggtgctaaacaaaagttcctagacatcggtaaacgtacttataaaataggcatgcctgaaaatgcgacgttcatttgtatccctacgacatcaggtacaggttcagaagtaacaccatttgcagttatcacagatagtgaaacaaatgtaaaatatccgttggctgattttgctttaacacctgacgttgcaattattgaccctcaatttgtgatgagtgtgccaaaaagcgttacagcagatacaggaatggatgtactaacgcatgcaatggaatcatatgtatctgtaatggcttcagactacacaagaggtttgagtctacaagcgattaaattgacgttcgaatatttaaaatcatctgttgaaaagggtgataaagtttcaagagagaaaatgcataacgcatcaactttggctggtatggcatttgcaaatgcattcttaggcattgcacactcaattgcgcataaaattggtggcgaatatggtattccgcatggtagagcgaatgcgatattactaccgcatattatccgttataatgccaaagacccgcaaaaacatgcattattccctaaatatgagttcttcagagcagatacagattatgcagatattgccaaattcttaggattaaaaggtaatacgacagaagcactcgtagaatcattagctaaagctgtctacgaattaggtcaatcagtcggaattgaaatgaatttgaaatcacaaggtgtgtctgaagaagaattaaatgagtcaattgatagaatggcagagctcgcatttgaagatcaatgtacaactgctaatcctaaagaagcactaatcagtgaaatcaaagatatcattcaaacatcatatgattataagcaataatctatctgataataatcatctaactcacctgaaattacaaaagtaaaaaatgccacataaactttaagtcgataatcattatacggttatcggcttttatttattgccaaatcttcagagagatacaaactagacaatcatttttttaaataaagaaaatattaagattgatactcatttcacaaactattactactttagagtataattatttttaatttcatataaataaaaaggcgaaaataatgcggtttaaaagtaattaattgttcaaacgatatgtaatatgtaaatactatatatataataccaattttaatgaaaatttttaagggaggtaaataatggaaagtacattagaattaacaaaaattaaagaagtattacaaaaaaacttgaagattttaattattttaccgctattatttttaattattagcgctattgttacatttttcgtcttatcacctaaatatcaagctaatactcaaattttagtgaatcaaactaagggtgacaatcctcagtttatggcgcaagaggttcaaagtaatattcaacttgtaaatacgtataaagaaattgttaaaagtcctagaattttagatgaggtgtcaaaggacttaaatgataagtattcaccatctaaattgtcgagtatgttgacaattacaaaccaagaaaatacgcaacttatcaacatccaagttaaaagtggtcataaacaagattcggaaaaaattgcgaatagcttcgctaaagttacaagtaaacaaattccgaagattatgagtgtggataacgtatcaattttatctaaagcagacggtacagcagttaaagtcgcaccaaaaactgtagtgaatctaatcggtgcattctttttaggattagttgtcgcgcttatatatatcttcttcaaagtaattttcgataagcgaattaaagatgaagaagatgtagagaaagaattaggattgcctgtattgggttcaattcaaaaatttaattaaggatggttgctacttatgtcaaaaaaggaaaatacgacaacaacactatttgtatatgaaaaaccaaaatcaacaattagtgaaaagtttcgaggtatacgttcaaacatcatgttttcaaaagcaaatggtgaagtaaagcgcttattggttacttctgaaaagcctggtgcaggtaaaagtacagttgtatcgaatgtagcgattacttatgcacaagcaggctataagacattagttattgatggcgatatgcgtaagccaacacaaaactatatttttaatgagcaaaataataatggactatcaagcttaatcattggtcgaacgactatgtcagaagcaattacgtcgacagaaattgaaaatttagatttgctaacagctggccctgtacctccaaatccatctgagttaattgggtctgaaaggttcaaagaattagttgatctgtttaataaacgttacgacattattattgtcgatacaccgccagttaatactgtgactgatgcacaactatatgcgcgtgctattaaagatagtctgttagtaattgatagtgaaaaaaatgataaaaatgaagttaaaaaagcaaaagcacttatggaaaaagcaggcagtaacattctaggtgtcattttgaacaagacaaaggtcgataaatcttctagttattatcactattatggagatgaataagtatgattgatattcataaccatatattgcctaatatcgatgacggtccgacaaatgaaacagagatgatggatcttttaaaacaagcgacaacacaaggtgttacagaaatcattgtaacatcacatcacttacatcctcgatataccacacctatagaaaaagtgaaatcatgtttaaaccatattgaaagcttagaggaagtacaagcactaaatctaaagttttattatggtcaggaaataagaattaccgatcaaatccttaatgatattgatcgaaaagttattaacggtattaatgattcacgctatttactaatagaatttccatcaaatgaagttccacactatactgatcaattatttttcgaattacagagtaaaggctttgtaccgattattgcacatccagagcggaataaagcaataagtcaaaaccttgacatactatacgatttaattaacaaaggtgctttaagtcaagtgacaacggcgtcattagcgggtatttccggtaaaaaaattagaaaattagcaattcaaatgattgaaaacaatctgacacatttcatcggttcagatgcgcataacacagaaatcagaccgttcttaatgaaagacttatttaatgataagaaattacgtgattattatgaagatatgaacggatttattagtaatgcgaagttagttgttgatgataaaaaaattcctaaacgaatgccacaacaagattataaacagaaaagatggtttgggttataaacagcaaatgaggggttttatggcacatttatctgtgaaattgcggcttttaatactagcattaatcgattcactgatagtgacattttcagtattcgtaagttattacattttagaaccgtatttcaaaacatattctgtcaaattattaatattggcagctatatcactattcatatcgcatcatatttcagcatttatttttaatatgtatcatcgagcgtgggaatatgccagtgtgagtgaattgattttaattgttaaagctgtgacgacatctatcgttattacgatggtggtcgtgacaattgttacaggcaatagaccgttttttagattgtatttaattacttggatgatgcacttgattttaataggtggctcaaggttattttggcgtatttatcggaaataccttggaggtaagtcatttaataagaagccaactttagttgttggtgctggtcaagcaggttcaatgctgattagacaaatgttgaaaagtgacgaaatgaaacttgaaccggtattagcagtcgatgatgacgaacataaacgcaatatcacaattactgagggtgtaaaagtccaaggtaaaattgcggatattccagaactagtgaggaaatataagattaaaaaaatcatcattgcaattccaactattggtcaagagcgtttgaaagaaattaataatatttgccatatggatggcgttgagttattgaaaatgccaaatatagaagacgtcatgtctggtgagttagaagtgaaccaacttaaaaaagttgaagtagaagatttactaggcagagatcctgttgaattagatatggatatgatatcaaatgaattgacgaataaaactattttagttacgggtgcaggtggttcaataggatcagaaatttgtagacaagtttgtaatttctatccagaacgtattattctacttggccatggtgaaaacagtatttatttaatcaatcgtgaattgcgaaatcgcttcggaaaaaaatgttgatatcgttcctattatagcggatgtgcaaaatagagcgcgtatgtttgaaattatggaaacgtataaaccatacgcagtttatcatgcagcagcacacaagcacgtgccgttaatggaagacaaccctgaagaagcagtacgtaataatattttaggtacgaaaaatactgctgaagctgctaaaaatgcagaggtaaagaaattcgttatgatttctacggataaagccgttaatccgcctaatgtcatgggagcttcaaagcgaattgcagaaatgattattcaaagtttaaatgatgaaacgcatcgaacaaattttgttgcagtgagatttggtaatgtacttggatcgagaggatctgtgattccacttttcaaaagtcaaattgaagaaggtgggccagttactgtgacacatcctgaaatgacacgttactttatgacaattcctgaagcttctagactagttttgcaggcaggggcattagcagaaggtggcgaagtatttgtgctagatatgggagaaccagtgaaaattgtagatttggcacgtaatttaattaagctaagtggtaaaaaagaagacgacatacgcattacttatacagggattagacccggcgaaaaaatgtttgaagagcttatgaataaagatgaggttcatcctgaacaagtatttgaaaaaatttatcgtggcaaagtacaacatatgaaatgtaatgaagttgaagcgattattcaagacatcgtcaatgactttagtaaagaaaaaattattaactatgccaatggcaaaaagggagataattatgttcgatgacaaaattttattaattactgggggcacaggatcattcggtaatgctgttatgaaacagtttttagattctaatattaaagaaattcgtattttttcacgcgatgagaaaaaacaagatgacattcgaaaaaaatataataattcaaaattaaagttctacattggtgatgtgcgtgatagtcaaagtgtagaaacagcaatgcgagatgttgattacgtattccatgcagcagctttaaaacaagtgccgtcatgtgaattctttccagttgaggcagtgaagacaaatattattggtacagaaaatgtcttacaaagtgctattcatcaaaatgttaaaaaagtcatatgtttatctacagataaggcagcgtatcctattaatgctatgggtatttcaaaagcaatgatggaaaaagtattcgtagccaaatcaagaaatattcgtagtgaacaaacgcttatttgtggtacaagatacggtaatgtgatggcttcaagaggatcagtaatacctttgtttatcgacaaaatcaaagctggagaacctttaacgattacagatcctgatatgacaagatttttaatgagcttagaagatgcggtagaactagttgttcatgcatttaagcatgcagagacaggagatattatggttcaaaaagcaccaagctcaacggtaggggatcttgcgaccgcattattagaattgtttgaagctgataatgcaattgaaatcattggtacgcgacatggagagaaaaaagcagaaacattgttgacgagagaagaatacgcacaatgtgaagatatgggtgattattttagagtgccggcagactccagagatttaaattatagtaattatgttgaaaccggtaacgaaaagattacgcaatcttatgaatataactccgataatacacatattttaacggtggaagagataaaagaaaaacttttaacactagaatatgttagaaacgaattgaatgattataaagcttcaatgagataggagagattgacgttgaatattgtaattacaggagcaaaaggttttgtaggaaaaaacttgaaagcagatttaacttcaacgacagatcatcatattttcgaagtacatcgacaaactaaagaggaagaattagagtcagcattgttgaaagcagactttgtcgtgcatttagcgggtgttaatcgacctgaacatgacaaagaattcagcttaggaaacgtgagttatttagatcatgtacttgatatattaactagaaatacgaaaaagccagcgatattattatcgtcttcaatacaagcaacacaagataatccttatggtgagagtaagttgcaaggggaacagctattaagagagtatgccgaagagtatggcaatacggtttatatttatcgctggccaaatttattcggcaagtggtgtaagccgaattataactcagtgatagcaacattttgttacaaaattgcacgtaacgaagagattcaagttaatgatcggaatgttgaactaacgctaaactacgtggatgatatcgtcgctgaaataaagcgtgctattgaaggaactccaacgattgaaaatggtgtacctacagtaccaaacgtatttaaagtgacattgggagaaattgtagatttattatacaagttcaaacagtcacgtctcgatcgaacattgccgaaattagataacttgtttgaaaaagatttgtatagtacgtatttaagctatctacctagtacagactttagttatcccttacttatgaatgtggatgataggggttcttttacagaatttataaaaacaccggatcgtggtcaagtttctgtaaatatttctaaaccaggtattactaaaggtaatcactggcatcatactaaaaacgaaaaatttctagtcgtatcaggtaaaggggtaattcgttttagacatgttaatgatgatgaaatcattgaatattatgtttctggcgacaaattagaagttgtagacataccagtaggatacacacataatattgaaaatttaggcgacacagatatggtaactattatgtgggtgaatgaaatgtttgatccaaatcagccagatacgtatttcttggaggtatagcgcatggaaaaactgaaattaatgacaatagttggtacaaggcctgaaatcattcgtttatcatcaacgattaaagcatgtgatcaatattttaatcagatattagtacacactggtcaaaattatgattatacattgaatcaaattttctttgatgatttggaattaagacaaccggaccactacttagaggcagttggaagtaaccttggagaaacgatggggaatattattgcgaagacatatgatgttttattacgcgaacaaccagatgcacttttaattcttggtgatacaaatagttgtttagcagcagtatctgctaaacgattaaagattcctgtgttccacatggaagcgggtaatagatgctttgatcagaatgtacctgaagaaatcaatcgtaaaattgttgaccatgtcagtgatgtgaatctaccttatacggaacatagcagacgttatttattagatgaaggcttcaataaagcgaatatctttgtgacaggatcaccgatgacagaagtgatagaagcgcatcgagataaaattaatcacagtgacgttttaaataaactaggattagaaccgcaacaatacattttagtatctgcgcatagagaagagaatatcgataatgaaaagaattttaaatcattaatgaatgcgataaatgatattgccaaaaagtataaaatgcctgtgatttattcaacgcatccaagaagttggaagaaaattgaagaaagtaaatttgaatttgatccattagttaaacagttaaagccatttggtttctttgattataatgcattgcaaaaagatgcatttgttgtgctatcagatagtggaacattgtcagaagagtcgtctattttgaagttccctggtgtccttattcgaacttccacagaaagaccggaagtactagataaaggtacggttattgtaggtggtattacctataacaatctaatccaatccgttgaactagcaagagagatgcaaaacaataacgaaccgatgattgatgctattgattataaagacactaacgtttcgacaaaggtagttaaaattattcaaagctataaagatattatcaatcgaaatacttggaggaaatgacgatgaggatagcgattgaaaagataattggtttgctgaaaaaccagtcctctaaagaatcgaatgttaagattcatcgcttggcgtatattacaaactcaaaatttgatggcaataactatatagatagatggtgtaaaatcaggaattctcacattggtgaatacagttatattggatttggtagtgattttaataatgtagaagtaggaagatattgttcgatatcttcggatgtaaaaattgggttaggaaaacatcctacacacttttttagctcatcaccgattttttattctaataataatccatttaacataaagcaaaagtttatagactttaatgaccaaccaagccgtacaacaattaaaaatgatgtgtggattggtgcaaatgtaattattatggatggtttaacaataaatactggtgcagtcatagcagccggctcagttgttactaaaaatgtaggagcatatgaggttgttggtggtgttcctgcaaaagtgattaagaagcgatttgacaataaaacaattgaaaaacttttggaaagcaagtggtgggagaaaacgcctgacaaactaaaaggattttcggttgaatatttaaataaaaaggatacttaatgatatgagaattttaaatattgtatcgagtaatattgttcaagacccaagggtacttaaacaaatagaaacaattaaaggcgttacggatgattataaaattgttggaatgaataattcacaagctactaataagcgattggaaaatttagattgtaattatcgtttgttaggtagcaaggtagatccaaaaaatattctttctaaattaattaagcgtataagatttgcaacaggtgttatccgagaaattaaagcttataaacctgacgtgattcatgcaaatgatttcgacgtattattaatggtctatttaagcaattataaaaaagctaatattgtttatgatgcgcatgaaatatatgcgaaaaatgcctttattaataaagttccacttatttcaaagtttgtagaaagtatagaaaaacacatagtaaaacatcgtgttaatgccttcgtaacagtaagtcatgcagcaaaagaatattatcaatctaaaggatataagaaggaagcgaatgttattacgaatgcacctattttaaatgatagcagagaatttaaagaaatcgaaaactttaaagaaattgtatatcaaggtcaaattgtaatggacagaggatatgaagagtttattattgcttcatcagcttttaaacaaaatgctccttcattcataattcgagggtttggtccgcatgaagaagtgataaaagaactgattagttataacccggaaaatattaggttggataaaccagttgaagtaaaagaattggttgataagttagcagaaagtaatgttggtgttgtcttgacgaaaccagtatctattaattttgaatatacagtatctaataaaatttttgaatgtatacatgctggtttaccagtaattttatctcctgtcaaagagcatatttatctcaatgaaaaatataaatttggcattgttctaaaggaagttacgccgttagaaattgaaaaggcggttagaaaattaagagataatcacgatttgtttaatcatttacgtcaaaatgcaattaaggcgtctaaaattttgaattggcaaatagagagtgaacggttagtagaattatataaattttaaagagaggtagactatgaaattttttgtactttgtgcaattatcagcatgaacatatttatagtaatctctacatttactaaagaagtattagggttccctatagagccggtgtattactcaaccatggttggtatagcattaattactacggtgtttgctatttataagataattgtcacccaagaaattccgcgagggttaatattattaattgctatatgtttgctttatctagctttttattatttttcaccagataaggaagagaaactagctaaaaataatattctattctttttaacatgggcagttccagcggcaattagtggtatttatattaaatatataaacaaggctacggtagaaagattttttaaattagtatttttcatattttctgtttcatttatttttgtaattttaataccaaaacttacaggtgagatacctagctatatcaattttggacttatgaactatcaaaacgcttcgtacctttcagcatttactgccggattaggcatttatttcattatgaaaggttcagttaaacataagtggatatatgttctatttacaataattgatatccctattgtgtttataccaggagggcgtggaggtgctattttattaattctttacggcttatttgcatttatacttattacgtttaaaagaggaatacctatcgcagtaaaaagcattatgtatatttttgcattaagcatatctagtgtattgatttactttctttttacaaaaggttcgaatactagaacattttcatatctacaaggtggaacacttaatttagaaggtacttctggaagaggaccgatttatgaaaaaggtatttactttattcaacaaagttcgttattaggctatgggccatttaactattataaactaatcggaaatataccacataacatcattattgagttgattctatcatttggcttattagggttttttatcataatgatttgcattttgctactagtttataaaatgattaggaactatgatccaaacactatagatttactcgttatgtttatagcaatctatccaatcacattattaatgtttagttcaaattatttagttgtaagtgaattttggtttgtgttgttctattttattacaaaaggacggcgtcatcatggctaagaaagtttttattatggatagcgtaaagacaataattggtacgttgcttatagctttaggattacaatttttagcttatccaattattaatcaacgagtaggtaatgaagcgttcggttctattttaacgatttatacaataataacaatcacgagtgttgtattaggcaatacgcttaacaatatacgattgattaatatgaatctatacaaatccaatcattactactggaaatttgcatcgatacttttaatctcaattctgattgagagtatagctttaattattgtatttctttacttttttaatttgaacatcatcgatattatctttttaattctacttaatattttaatgtgtttaaggatttatctgaatgtattttttaggatgactttaaaatataatcagattttgtatattgctcttattcaatttttaggtttgctgataggactatttctatattatttaacccaaaactggattgtttgttttattaccagtgaattgtttgcaacgatatatacattggttaaattacggggattaactataggcgagtatcaaagtgaagataataatgtggtaaaagattatgtgatgctactgagtacaaatagccttaataatttgaatctctatttagatagattaatcttattaccaattataggtggaacagctgtaactatatcatttctttcaacatttattgggaaaatgttagctacatttctatatccgattaataatgtagtactttcatatatttctgtaaatgaaagtgacaatataaagaagcaatatttgaaaactaatctaattgctatagctgccctatgtttagtcatgattatatgttatccaattacaataattattgtctctttactgtataacattgattcaagtttatattcgaagtttattattttaggtaatataggtgttttattcaatgcagtgagtattatgatccaaactttaaatacaaaacacgcatcaataacattacaagcgaattatatgacgcttcacacgattacatttatattcataactattttaatgacaattgcgtttggtctaaatggattcttttggacaacgctgttcagcaacattattaagtatgtgattttaaatattataggtttaaagtctaaattcattaataaaaaggacgtcgattagatgagtgaaaaaaagattttgattttatgtcagtatttttatccggaatatgtatcttctgcgacgttaccaactcaattggcggaagatttaattgcgaatcacattaatgtcgatgtcatgtgtggatggccatatgaatatagtaatcataaacaggtttctaaaaccgagatgcatcgtggtattcgcattcgacgtctcaagtattcgaggtttaataacaaaagtaaggttggaaggatcatcaatttctttagtttattttcaaaattcgtgattaatatacctaaaatgttgaaatatgatcagattcttgtttactctaatccaccaatcttgccattaataccagacgttttacacagactgcttaagaaaaaatattcttttgtggtgtatgatatagcacctgataatgcgattaagacaggtgcaactcgtccaggtagcatgattgataagctgatgcgttacattaatagacatgtctacaagaatgctgaaaatgtcattgtccttggtacggaaatgaaaaactacttactaaatcatcaaatttctaaaaatgctgacaatatccatgtgattcctaactggtatgacatgcgtcaattacaagacaatcgtatctataatgacacatttaaagcttaccgtgagcaatacgacaaaattttattgtatagcggtaatatggggcagttacaggatatggagacacttatctcatttttaaaattaaataaggatcagtctcaaacgttaacaatactttgtggtcatggtaagaaatttgcagatgtcaaaacggcaatagaagaccatcgtattgaaaatgttaaaatgtttgagtttttaacaggtacagactatgctgacgtattaaaaattgcggatgtatgtattgcatcgctgattaaagaaggcgtcggtttaggcgtgccgagcaagaattatggctatcttgcagctaagaaagcgttggtactcatcatggataagcaatctgatatcgttcaacatgttgaacaatatgatgcgggtatccaaattgataatggcgatgcacatgccatttataacttcatcaacactcactcgagtaaggaattgcacgagatgggtgagcgcgcacatcaactgtttaaagataaatatacgagagaaattaatactatgaagtattacaatctgttgaagtgaggagataattatgaagcgattattcgatgtagtgagttcaatatatggtttagtagttttaagtccgattctgttaattacagcattactaattaaaatggaatcacctggaccagccattttcaaacaaaaaagaccgacgattaataatgaattgtttaatatttataagtttagatcaatgaaaatagacacacctaatgttgcaactgatttaatggattcaacatcgtatataacaaagacagggaaggtcattcgtaagacctctattgatgaattgccacaattattgaatgttttaaaaggagaaatgtcaattgtaggtcctagaccagcgctttataatcaatacgaattaatcgaaaaacgtacaaaagcgaacgtgcatacgattagaccaggtgtgacaggactagctcaagtgatggggagagatgatatcactgatgatcaaaaagtagcgtatgatcattattacttaacacatcaatctatgatgcttgatatgtatatcatatataaaacaattaaaaatatcgttacttcagaaggtgtgcatcactaatgagaaaaaatattttaattacaggcgtacatggatatatcggtaatgctttaaaagataagcttattgaacaaggacatcaagtagatcaaattaatgttaggaatcaattatggaagtcgacctcgttcaaagattatgatgttttaattcatacagcagctttggttcacaacaattcacctcaagcaaggctatctgattatatgcaagtgaatatgttgctgacgaaacaattggcacaaaaggctaaagctgaagacgttaaacaatttatttttatgagtactatggcagtttatggaaaagaaggtcatgttggtaaatcagatcaagttgatacacaaacaccaatgaaccctacgaccacctatggtatttccaaaaagttcgctgaacaagcattacaagaattgattagtgattcgtttaaagtagcaattgtgagaccaccaatgatttatggtgcacattgcccaggaaatttccaacggttaatgcaattgtcaaagcgattgccaatcattcccaatattaacaatcagcgcagtgcattatatattaaacatctgacagcatttattgatcaattaatatcattagaagtgacaggtgtgtaccatcctcaagatagtttttactttgatacatcgtcagtaatgtatgaaatacgtcgccaatcacatcgtaaaacggtattgatcaacatgccttcaatgctaaataagtattttaataagttgtcggtctttagaaaattattcggcaatttaatatacagcaatacgttatatgaaaataataatgcacttgaaattattcctggaaaaatgtcacttgttattgcggacatcatggatgaaacgacaaccaaagataaggcataagtcatctattaaataaaatcaacatacaaatcgttttatttggaggttatagtatgaagttaacagtagttggcttaggttatattggtttaccaacatcaattatgtttgcaaaacatggcgtcgatgtgcttggtgttgatattaatcagcaaacgattgataagttacaaagtggtcaaattagtattgaagaacctggattacaagaggtttatgaagaggtactgtcatcgggaaaattgaaggtatctacaacgccagatgcatctgatgtttttatcattgccgttccgacgccgaataatgatgatcagtaccggtcatgtgacatttcgctagttatgcgtgcattagatagtattttatcatttttagaaaaaggaaataccattattgtagagtcgacaattgcgcctaaaacgatggatgattttgtaaaaccagtcattgaaaatttagggtttacaataggtgaagatatttatttagtgcattgtccagaacgtgtactgccaggaaaaattttagaagaattagttcataacaatcgtatcattggcggtgtgactgaagcttgtattgaagcgggtaaacgtgtctatcgcacattcgttcagggagaaatgattgaaacagatgcacgtactgctgaaatgagtaagctaatggaaaacacatatagagacgtgaacattgctttagctaatgaattaacaaaaatttgcaataacttaaatattaatgtattagatgtgattgaaatggcaaacaaacatccgcgtgttaacatccatcagcctggtccaggtgtaggcggtcattgtttagctgttgatccgtactttattattgctaaagaccctgaaaatgcaaagttaattcaaactggacgtgaaattaataattcaatgccggcctatgttgttgatacaacgaagcaaatcatcaaagtgttgagcgggaataaagtcacagtatttggtttaacttataaaggtgatgttgatgatataagagaatcaccagcatttgatatttatgagctattaaatcaagaaccagacatagaagtatgtgcttatgatccacatgttgaattagattttgtggaacatgatatgtcacatgctgtcaaagacgcatcgctagtattgattttaagtgaccactcagaatttaaaaatttatcggacagtcattttgataaaatgaagcataaagtgatttttgatacaaaaaatgttgtgaaatcatcatttgaagatgtatcgtattataattatggcaatatatttaattttatcgacaaataaaatgtgtcaaactagggcatacatgattaaggaaagataagctgtcatgtgtttgaacttcagagaggataatgttatgaaaaaaattatggttattttcggtacgagacccgaagcaataaaaatggcaccattagtaaaagaaattgatcataatgggaactttgaagcgaacattgtgattacagcacaacatagagatatgttagatagtgtgttaagtatatttgatattcaagctgatcatgatttaaatattatgcaagatcaacaaacattagcaggccttacggcgaatgcacttgctaaacttgatagcatcattaatgaggaacaaccggatatgattttagtacatggtgatactacaacgacttttgtaggaagtttggcagcattttatcatcaaattccggtcggacatgtagaagctggacttcgaacacatcagaaatactcaccatttcctgaagagttaaatcgagtcatggtaagtaatattgctgaattgaattttgcgccaacagtaattgcagctaaaaatttactttttgaaaacaaagacaaagagcgtatctttattactggaaatacagttattgacgcattgtcaacaacagttcaaaatgattttgtttcaacgattattaataaacataaaggcaagaaagttgttttactaacagcgcatcgtcgtgaaaatattggggaaccgatgcatcagatttttaaagcagtaagagatttggcagatgaatataaagatgttgtcttcatttatccaatgcatcgtaatccaaaggtaagagcgattgccgaaaaatatttatctgggagaaatcggattgaattaattgagccattagatgcgattgagttccataattttacaaatcaatcgtacctcgtgctgacagattctggtggtattcaagaggaggctcctacatttggaaaacctgtgttggtattaaggaatcatacagagcgtcccgaaggcgttgaggcgggaacatcgagagtaattggcacagattatgacaatattgttcgaaatgtgaaacaattgattgaggatgatgaagcgtatcaacgtatgagtcaagcgaataatccatatggtgatggacaagcatcacgacgtatttgtgaagcaatagaatattattttggattgcgcacagacaagccggatgaattcgtacctttacgtcacaaataataaaaaacccctaatcatgaagttggtttagacaaccagcggtgactaggggtttttaatatatttatttttgatagtggtagccaatatcatatttgaatactttatttgataatattggactttgctgtccatcgtcatcactttttaaacgtacatttttatgagcttctttaaatacatcggaattcaaccaattattaaagctatcttcagattcccaaatagttaagattttaacttcgtctgtatcctcggtatttaatgttttagtgacaaacatttgttggaagccttcaatagtttcaataccttgtctattgtaaaaacgttcaatcgtttcttccgcactgcctttttgtaattgtaatctattttctgccataaacatgggcaatcactcctctattttatgatttgatttgggtaatgtttttacaaatgtaaagagtacagcggtttgtatgataaccattatgattaatcctacacggactgcaagaacatccaccatataaattgaaaaacctattacaatgtataagctaattaaaattttaattttctgttgtagcgtgtagcctcgatgtaaataaaagttttctacatattctttataaattttttgattaataagccaattgtaaaagcgatctgaacttcgagcaaaacaaaaaactgctacgagtaaaaaaggggtcgttggcagtaaaggtaatacggcacctgcaataccaagcgctgtaaatattaagccaatgacgattaaaataagtcgcattgaaaaaactccattctagtactaatgcgcatgtaatattgttttagtaatataactcatgctaaatataatgtgtatgataagtgcaatgactcagtaaaatgaaacgatgttgaattatccttgtcacattaacgcattttaagcgcgactttcataacaaccaaactatttaatgagaattattctcaagtattatagttatattatgtgttttatttttgaaaagtgcaatatgttttcgaaaataagattatttttatgtgcaaaaacgacgcaaaagttttaaaaatgagacttctgtgagctgattattttataaaatgtaaacgcttactatataatgtgaatcatatcgtttaaaagcattattaaatatgatgctaagagatttatattatagccaataaacaaaggagagataatatggcagtaaacgttcgagattatattgcagagaattatggtttatttatcaatggggaatttgttaaaggtagcagtgacgaaacaatcgaagtgactaatccagcaactggagaaacactatcacatattacaagagcaaaagataaagatgtcgatcatgcagtcaaagtggcgcaagaggcatttgaatcatggtcattaacttctaaatcagaacgtgcacaaatgttgcgtgatattggtgataaattaatggcacaaaaagataaaattgcaatgattgaaacattaaataatggtaaaccgattcgtgagacaacagcaattgatattccatttgctgcaagacatttccattatttcgcaagtgttattgaaacagaagaaggtacagtgaatgatatcgataaagacacaatgagtatcgtacgacatgagccgattggcgtcgtaggtgctgttgttgcttggaacttcccaatgctattagctgcatggaagattgcgccagccattgctgcaggtaatacaattgtgattcaaccttcgtcttcaacaccattaagtttattggaagttgctaaaattttccaagaggtattacctaaaggtgttgtcaatatactaacgggtaaaggttcagaatcaggtaatgcaattttcaatcatgatggtgtagataaattatcatttacgggctcaactgatgtaggttatcaagttgccgaagctgcagcaaaacatctagtacccgctacattagagcttggtggtaaaagcgccaatatcatattagatgatgctaatttagaccttgcagttgaaggtattcagttaggtattttattcaaccaaggtgaagtatgtagtgcaggttctcgattattagttcatgaaaaaatttatgatcaattggtgccacgtttacaagaggcattttcaaatattaaagttggaaatccacaagatgaagctacacaaatgggtagtcaaactggtaaggatcaattagataaaattcaatcatatattgatgcagcaaaagaatcagatgcacaaattttagcaggcggtcatcgcttaactgaaaatggattagataaagggttcttctttgagccgacattaattgctgtgccagacaatcatcacaaattagcacaagaagaaatatttggaccagtgttaacagtgattaaagtgaaggacgatcaagaagcaattgatatagctaatgattctgagtatggtttagcaggcggtgtattttctcaaaatatcacacgtgcattaaatattgctaaagctgtacgtacaggacgtatttggattaacacttacaaccaagtaccagaaggcgcaccatttggtggttataaaaaatcaggtatcggtcgagaaacttataaaggtgcgttaagtaactatcaacaagttaaaaatatttatattgatacaagcaatgctttaaaaggtttgtactagaataaatatcgtttctgaagcgtgtttgtaggtcagtctagcggtaagtcttaacatttaacggcgttgtttagattttaagcaaaacaaaatatataggaacacgtatcatgatattaggatataatgactaaaataatagcagtaggatggtttttaattgcaaatcatcttactgctgtttttaattatgctaatttgcgatgcggctattataaggacagagttgtttattaattatggtgatttagaaatatgaagttcaatatgcaaagtcatcgtttgttttaatatgcggaacaatcattaaagttattgcgattttttgaacttaatgaaactaaacaataaatttgagatacttttttgtcatttttatgtaactaacacaataatctcgtacattattaaaattttctatatgataggaataaagcaaagcgcgagtgtgctgtaaaagttttccaaggtgatattacataaagctataaagggtaaagattaatgagttgtcatgtaaatgacgatgatgtataaatcatggttaattacggaagcattaatattaacctgagaagctataaagaattatttttaaaagcgacaatattaaatacgacgcatttatttaggagtggcaaacgtatgaatgggaaaaaggcgaatacgataaacagatacaaatattttcatcatgtcaatcatcaaaaaattcaacaaagttctaaaaagacgctgtgggcatcactaatcatcacattgttatttacagtgattgaatttgtcggaggtttagtatctaattcattggcattactgtcagattcatttcatatgcttagtgatgtattagcacttggtttatctatgttggccatttattttgcaagtaaaaagccgactgcacgatacacatttggatatttaagatttgagatattagctgcatttttaaatggtttagcattaattgtaatttcaatctggattttatatgaagctattgtacgtattatttatccgcaaccaattgaaagtggcattatgtttatgattgctagtattggtttactcgtcaatattattttgactgttatccttgtaaggtctttaaaacaagaagacaatatcaatattcaaagtgcattatggcatttcatgggagacttattgaactctattggtgtcatcgttgcagttgtattgatttactttacaggatggcgcatcatcgacccaatcattagtattgtaatttcactcatcattttacgtggtggttataaaattacgcgtaatgcgtggttaattttaatggaaagtgtgcctcaacatttggatactgatcaaattatggcagatattaaaaacatagatggcatattagatgtacatgaatttcatttgtggagtattacaacagagcattattcattaagtgcccatgttgtgttagataaaaaatatgagggtgatgattatcaagcgattgatcaagtatcatcattgttgaaagaaaaatatggcattgcacattcaacgttgcaaattgaaaacttgcaattgaatccattagatgagccatacttcgacaaattaacataaataaaacattgtagcgcctaaaacattaatctatgtcataggcgcacgtttcgttttatacttatgttgcatcatttaaatgattttcgtcaatttctttgatgctatctacatctaacacgacatctttaggtttcaaaatatgaatatgtttttcatcatttgtatgtaaaatgcgttctatgatgtacctttgaccggccattgtttctacagcaatctttttgtttctagctaaacttgctacgacagattctttatccataatgatagccccctatatatatgtttatttacttataccctaacatgatttttatactctttgaaaatatattttacagaattttatctaaatatttaaaaaaatatcttaatatcattgtaatccgataagaattatagtaatattttttcaaccattgttataggaggtcttattaatgacattatttttattagaagctaacaatcttgattttgcatcaacgaaagaagaactagaagcaaaggcagcatcactatctacgaagacaattccaacattaattgaagtacaagctactgaaaatttaactcatggttattttattgtggaagcaaatgacgaagcagaagctaaacaatttttaacagaagcagatattagtattcaattagtcaaagaagtacgcttagttggtaaagatttagatgaagttaaaaatggtgatgcacatgttgattaccttgtaacttggaacattccggaaggcattacgatggatcaatatttagcacgtaaaaagaaaaattctgttcattatgaagaagtgccagaagttgaatttaaacgcacatatgtatgtgaagatatgtctaaatgtatttgtttatacaacgcacctgatgaagaagcggtacgtcgcgcgcgcaaagcagttgatacaccgattgatggcatcgaaaaactttaataagacaacaagttgatgagatatatgtatataggtttggcatggatttcgattgcagttaattagaatagctcaatgctataaatgtaagtagttgatatgaagaaactaatgaactaaatgcaagtattgtctaaaacaatcattttattgaaatttagtagagctgaaattaatataacgtcgttaattgaataacgcttatgttataagagcactcataccaaaccataatcatctatagatataacaattcacgatataagggctgtgtttggcatagccctttagatatacacttaattcctattaaaatagtagggattaaaagggggcttgtcatgattaaaattcaacaattacaacatcactttggatcacataaagtaattcataactttaatttggacattagcaagggagaaatagtcactttcatagggaaaagtggttgcggaaagtctactttactcaatattatcggtggatttattcatccatcgtctggtcgtgtcattattgataacgaaattaaacaacagccatctccagattgtttaatgctatttcaacatcataatttgctgccatggaaaacgattaatgacaacattaggattggattacaacagaaaattagtgatgaagagattaacgcacagcttaaattagttgatttagaagacaggggaaagcattttcccgagcaactgtccgggggtatgaaacaacgtgtggcactatgtcgagcgcatgtgcataagcctaacgttatattgatggatgagtcattaggtgcattagatgcatttacacgttataaacttcaggatcaactagtgcaactaaaacataaaacgcaatcaactattattttagtgacgcatgacattgatgaagctatttatctttccgaccgcattgttctgttaggtgaagggtgcaatattatttctcaatatgaaattacagcatcacatccacgcagtcgtaatgatagccacctacttaagattcgtaatgaaattatggaaacatttgcattgaatcatcatcaagttgaacctgaatattatttataaggagtgagtgacgatgaaaaggttaagcataatcgtcatcattggaatctttataattacaggatgtgattggcaaaggacgtctaaagaacggtctaaaaatgcccaaaatcagcaagtgattaaaattggatatttgccgattacacattcagctaatttgatgatgactaaaaaattattatcacaatacaatcatccgaaatataaactagaattagttaaattcaataattggccagatttaatggacgcattaaacagtggtcgtattgatggtgcatcaactttaatagagctagcgatgaaatcaaaacagaagggctcaaatataaaggctgtggcattgggccatcatgaaggcaatgtcattatgggacaaaaaggtatgcacttaaatgaatttaataataatggcgatgattaccattttggtataccacatcgttattcaacacattatcttttacttgaggaattacgtaaacaattaaagattaaaccggggcattttagctatcatgaaatgtcgccagcagaaatgccagccgcattgagtgaacacagaattacagggtattctgtagccgaaccattcggtgcactgggtgaaaagttaggcaaaggtaagactttgaaacatggtgatgacgttatacctgatgcgtattgctgtgtgctagtactgagaggggaattgcttgatcaacacaaggatgtagcgcaagcatttgtacaagattataaaaagtctggctttaaaatgaatgatcgcaagcaaagtgtagacattatgacgcatcattttaaacaaagtcgtgacgttttaacacagtcagcggcatggacatcctatggtgatttaacaattaagccatccggctatcaagaaattacgacattggtaaaacaacatcatttgtttaatccacctgcatatgatgactttgttgaaccgtcattgtataaggaggcatcgcgttcatgacacgtcccacaaataacaaatttatattacctattatcacatttattattttcttaggcatttgggaaatggtcattattattgggcattaccaacctgtattgttaccgggtcctgctcttgtaggaaaaagtatatggtctttcattgttactggagaaattttccaacatttagcaattagtttatggagatttgtagcgggctttgttgtcgcattgttggttgctattccattgggcttcttgcttggaaggaatcgttggctatacaacgctatcgaaccgctatttcaattgattaggccgatatctccgatagcatgggcaccatttgttgttctatggtttggtattggtagtttgccagcgattgcgattatttttatcgctgcttttttcccaattgtgttcaatactattaaaggcgttagagacattgaacctcaatatttaaaaatagcagcaaatttaaatttaactgggtggtcattgtatcgcaatatattatttcccggggcatttaaacaaatcatggctgggatacatatggcggtaggaacaagttggatatttttagtttctggtgaaatgattggtgcacaatcgggattaggttttttaatcgttgatgcacgaaatatgttgaacttagaagatgttttagcagcaatattctttatcggattatttggttttattattgatcgattcattagttatattgagcagtttatacttagaagatttggtgaataaggagagatgatgatgactttagaaacgcttatcaaagaacaattagatcctcatttagtagaagttgatgaagggacgtattatccgagaacatttattcagcaattatttgtagatggttatttcggtgaggcggcattgagaaaaaatgctgaagtaatcgaagctgtatcgcagtcttgtttgacaacaggattttgtttatggtgccaattagctttttcaacgtatttagaaaatgccacgcagccacatttaaataatgacttacaacagcaattgttatctggagaaatattaggtgctaccggattgtctaatccgatgaagtcatttaatgatttagaaaagttgaaccttgaacacacttatgttgatggacaattggttgtcagtggacgtatgccagctgtaagtaatattcaagaagaccattattttggtgcgatttcgaaacatgaatcatcagatgaatttgtcatgttcattctacgtgccaatcaagatggtatcactcttgttgaaaaaaccaattttttaggagtcaacgggtcagcaacgtatcaaatcacattgaatcaagtcgtagtgccacaatcacaaattatcacgcatgatgcgaagcagtttgcggcaactattcgcccgcaatttattgcttaccaaattccaataggattaggctcaattaaaagttctttagagttaattgatgcattttcaaatgtgcaaaacggaataaatcaatatttagagtatgatgttgaagcttttaaaaaacgttatcgtcaacttagagaggaatattatgcaatattagatgacggtaacttaacttcacatttaaatgaattaatatcattgaagaaggacatcggctatttattgttagatgtaaatcaagcttctgttgtcaatggtggttctagagcgtacacaccatattcgccacaagttcgcaagttaaaagaaggattcttcttcgcagcattgacaccgacattaagacatttaggtaaacttgaagcagagttgaaggggtaagtgtgataagctgattttttgtttagatgcgtttgttgaaacattttttaaaataatataaatcttagtttataaacattttctgttaatttgttatatccttttaactaggaaaatatacatttcgtaataataataatcgttatcattgaaaaagtgttaataaggtgtataatgaaaatgtgaacaattaatgaacttcttattttaaagaaggtgaatactatagatacgcatactaaagaacaacaattctcgaatctagtaagatcttatcgtaaagaatacgtgggtaaaggacccaatagtattcgagtgtcgtttaaagataattgggcgattgcacatatgacaggtgttttgagtaaagttgagagtttttacctaaacgacaaacgcaatgaatcgatgctccattatacacgcacagagaagattaaacagatgtataaagaaatagatgtaaatgagatggaaagtcttgtaggcgctaagtttgtaaaattatttacagatattgatttgaatgatgatgaagtcatttcaatatttgttttcgataagtcaatagaataagtgttgctggtgtaaggtacacggtgctgtttgctaacttcgctttgaatttaacaataattcaagggggtggtatgtcaaacggtgccgtttttttgtcatatttttaaaacaagcaacatgcaacacgtactttaaggaagtcaaaatttatcatttaggagagatggatatgaaaatcgtagcattatttccagaagcagtagaaggtcaagaaaatcaattacttaatactaaaaaagcattaggattaaaaacatttttagaggaaagaggacatgagttcattatattagcagataatggtgaagacttagataaacatttaccagatatggatgtgattattagtgcgccattttatcctgcatatatgactcgtgaacgtattgaaaaagcaccgaacttgaaattagcaattacagcaggtgtaggatctgaccatgtagatttagcggcagcaagtgaacacaatattggtgtcgttgaagttacaggaagtaatacagttagtgtggcagaacatgcggttatggatttattaatacttcttagaaactatgaagaaggtcatcgtcaatcagtagaaggtgaatggaacttgtctcaagtaggtaatcatgcgcatgaattacaacacaaaacaattggtatttttggatttggtcgaattggacaacttgttgctgaaagattagcgccatttaatgtaacattacaacactatgatccaatcaatcaacaagaccataaattgtctaaatttgtaagctttgatgaacttgtttcaacaagtgatgcgattacaattcatgcaccattaacaccagaaactgataacttatttgataaagatgttttaagtcgtatgaaaaaacacagttatttagtgaatactgcacgtggtaaaattgtaaatcgcgatgcgttagttgaagcgttagcatccgagcatttacaaggatatgctggtgatgtttggtatccacaacctgcacctgctgatcatccatggagaacaatgcctagaaatgctatgacggttcactattcaggtatgactttagaagcacaaaaacgtattgaagatggagttaaagatattttagagcgtttcttcaatcatgaacctttccaagataaagatattattgttgcaagtggtcgtattgctagtaaaagttatacagctaaatagaataaggatgctgggctagcgattaacgctttcaattttatataaatgaatcatataagcactactgctgttgtaaagatggcagtagtttttttatgattacatctaagtatagtcacggctatgttaggacaatgatttaacatttacgcacatatgtgttcacttacgcaattattgataaatttcattcatttggaataatatatagtcatatagtgctaatttttttgaggcattatatgcaagatgcattgtaaagtcgatgcatttgtttgttaaataactttgtataactaaaaattctttgtttcaacgtataatctaataatagattttatataaatggtagtgtgtatatatgtggaaaggggtgtagttattaatgaaacgcttaagtacgactttgaaagtacgattgattagcaattttttacagctaattattacgacagcatttataccgtttatagcactatatttaacagatatgttaagtcaatcaattgtcggtatatatcttgttggtttagtggttctaaaatttccattgtccattatatctggttaccttattgagatatttccgaaaaagttgctagtacttatttatcaagcgacgatggtgataatgcttgtgttcatgggcgtatttgggtcacatcaattgtggcaaattattggtttttgtgttgcatatgccatatttacaatcgtttggggattacaatttccagttatggacacattaattatggatgcaattaccgaagacgtggaacattatatttacaagattagctattggatgacaaacttatcggtagctattggggcattgttaggtggcttgatgtatggctacagtatgttactacttttcttaatagcagcttgtatatttttaattgtactctttattttatatatttggttacctcaagaccgaaatcaagtaaagcaaagtgatgacaagaggcatgcaagtcgttatcaaaaattacaaataatgaatatatttcgcagttataaattagttttgaaagaccgtaattatatgttattgatttcggggttcagtatcatcatgatgggtgaattttcaatctcctcatatattgctattagactaaaggatcagtttgaaacaataagtataggttcatatgatattacaggtgctaagatgttagcaatcttgctaatgattaatacggtcgtcgtcattttactcacgtattcaatctcgaaagttgtattgaaaatagattttaaaaaagctttaatcactggtttgctgatttatattgttggctatagtggtctaacctatcttaatcagtttggcttattagttgtttttatgataattgcgactgtaggtgaaattatttattcgcctatagtttcagaacaacgctttaaaattattcctaaagctaaaagaggaacatatagtgcagttaatgcattaggtattcatttttcagaaacactagctaggttagggattgtgttgggtgttttcttaacgtcattacaaatgggactgtatatgtttatcgttttaacaattggtgctagcatgcttgttgctggtgtatttgggggacaaaaacaagtgaatacaaattgaatttatttaaatatttattttatgcatctttttatatggaaaacctattaatttggtcgtaattaaaatagagataaatttattaagaatttgttaaaatttaaggataacaattgttttatgcgagttgtttgtttaatataaacttgcttcatggatattttgtaacaacaatattgagtttgcaatgagatgtgaacaacagaaagtgattaacgagttgtagtgtgctatttatcgaagatgtatgtaatttacattgaaaaatataccaattgtaacgatgatacaagatgtattttagggtagaatatatcgctcatatgttgcgaatggtgttttatattaatcattacataacgagttaattaacatttcgtcggttatcatatcatcatgcaatttcagtaagtaatgagtattatgatatgaaagaaggactttttatgattatgggtaatttgagatttcaacaggaatattttcgtatatacaaaaataatacagaatcaacgacacaccgtaatgcgtattgggttaaactcgctaaaaatgttgaagctactaaaatgatgtatgcattatcgacaattgtgcaacaacatgcatctataagacatttttttgatgttactaccgatgacaatttaacaatgatacttcatgaatttctgccttttattgagataaaacaagttccatcttcttccgcaaactatgatttagaagctttttttaagcaagaattaagtacttaccattttaatgattcacctttattcaaagttaaattgtttcagttcgctgatgctgcatatatactattagattttcatgtgtccattttcgatgatagtcaaattgatatttttcttgatgatttatgcaatgcatatcgtggcaatactgttattaacaatactcgacagcatgcacatataaatagaaatgatgataaagacaatcaagatgcatcgcatatagcattagactcaaactattttcggttagagaataactctgacatccatattgatagttattttccaattaagcatccatttgaacaagctttatatcaaacgtatttgattgatgatatgacatcaatagatatggcatcgttggctgttagtgtgtatttagctaatcatataatgagtcaacaacatgatgtcacattaggtatacatgtaccatcacatttaccaaatgatttacacggaaatattgtgccgttaacgttaacaatcgatgcaaaagatgtatgtcaacgttttacaacagattttaataaatgtgtgttgcaaaatatgtcgcaattacagtgcgcgaagtcttcgctttcactagagactatttttcattgttatcatcatatgatgtcttgttgtaatgatgttattgaggatgtacatcaaatacatgatgcacatacatctttagcggatattgaaatttttccacatcaacacgggttcaaaattatatataacagtgcagcatatgatttgctctcaatcgagacgctgagtgacttagttcgaaatatttatttgcaaattactgaagaaaatggaaataaacgaacaactgtagatgaacttaatttgatgacagaacgtgatattcaattatatgacgatatcaatttaagtttgcctgagatagatgatgcgcaaacagttgttaccttatttgagcaacaagttgaagcaacgccgaatcatgtcgctgtgcaatttgacggagtgtttataacatatcaaacattgaatgcacgcgcgaatgatttagcacaccgtttgagaaaccagtatggtgttgaacctaatgatcgtgtcgctgtcatagctgaaaaaagtattgagatgataatagcgatgataggtgtgttgaaagctggtggggcttacgtgccaattgatccgaactatccaagtgatcgtcaggagtacattttaaaagatgtaacgcctaaagttgtaataacgtaccaagctttatatgaaaatggtaaacaaaatattaatcacattgatttgaataagatagcgtggaaaaatattgataatctttctaaatgtaacacgttagaagatcatgcttatgttatttacacgtcggggacaactggtaaccctaaagggacactaattccgcaccgaggtattgttcgcttggtccatcaaaatcattatgtaccattaaatgaagagacgacgattttgttatcaggaactatagcctttgatgctgcaacatttgaaatatatggtgcattgctcaatggtggaaagctgattgttgctaaaaaagaacaattattaaatccaatagcggtagaacaattaatcaatgaaaatgacgttaatactatgtggttaacctcctcattatttaatcagattgctagtgaacgaatagaagtattggtaccgttaaagtatttattaattggtggagaagtattgaatgctaagtgggtggatttgcttaatcaaaaaccgaagcatcctcaaattattaatggttatggaccaactgaaaatacaacatttacaacgacgtataatatacctaacaaagttccaaatcgtattcctattggtaaaccgattctgggtactcatgtttatatcatgcaaggcgagcgtcggtgtggcgttggtattcctggagaattatgtacaagtggctttgggttagctgcaggttatttaaatcagccagaattgacagcagataaatttatcaaagattcaaatataaatcagctgatgtatagaagtggtgatatcgttcgtttgttacccgatggcaacatagattatttatatcgaaaggacaaacaagttaagattcgagggtttaggattgagttgtcagaggttgagcatgcgctcgagcgtatacaaggtattaataaagcagttgttattgttcaaaatcatgatcaagatcagtatatcgttgcttattatgaagcgatgcatacattatcacataataagattaaatcacaattacgtatgaccttaccggagtacatgataccagttaatttcatgcatattgagcaaattcctattactattaatgggaaattagataagaaggcattgcctatcatggactatgtcgatacggatgcctatgtagcaccgagtacagataccgaacacttgctatgccaaatttttgcagatattttacatgtgaatcaagtaggtattcatgataatttctttgaattaggtggccattcattaaaagcaacgttagtggtgaatcggatagaggcatctactgggaaacgattacaaattggtgatttattacaaaagccaactgtatttgaactagcacaagcgattgctaaggttcaagaacaaaactatgaagtgattccagaaactatagttaaagatgattatgtgctgagctctgcacaaaagcgtatgtatttattatggaaatcaaaccataaagatacggtgtataacgtaccttttttatggcggttatcatcagaacttaatgtagctcaattgcgacaagcagtgcagcgtttgatagcgcgacatgagattttacgaacacaatatattgttgtagatgatgaggttcgacaacgtattgtggcagatgttgcagttgactttgaagaagttaacacgcattttacggatgaacaagaaatcatgcgccaatttgtagcaccttttaatttggaaaagccaagtcaaattagagtgagatacattagaagtcccttacatgcatacctctttatagatacgcatcatatcattaatgacggtatgagtaatatacaattaatgaatgatcttaacgcactttatcaacataaattattgttaccacttaaattgcaatataaagactatagtgagtggatgtcgcatcgtgatatgacgaaacatagacaatattggttatctcaattcaaagatgaagtacctattttaagcttaccgacagactatgttagaccaaatattaaaacgacaaatggagcaatgatgtcatttacaatgaatcaacaaatgagacagctacttcaaaagtatgtagaaaagcatcaaattactgattttatgttctttatgagtgtggtcatgacgttgttaagtagatatgctcgaaaagatgatgttgttgtcggtagtgtgatgagtgcgcgtatgcataaaggcacggagcaaatgctaggcatgtttgctaatacgttggtatatagagggcaaccgtcacctgataaaatgtggacacagtttttacaagaggttaaggaaatgagtttggaggcatacgagcatcaagaatacccattcgaatgtttagtaaatgacttagatcaatcacatgatgcctcacggaatccattatttgatgtcatgttagtactacaaaacaatgaaacgaatcatgctcattttgggcatagtaaattaacacacattcaacccaaatcagtgacggcgaaatttgatttatctttcatcattgaagaagatcgcgatgactatacaatcaatatcgagtataataccgatttatatcactcagaaacagttcgtcacatgggtaatcaatgtatgattatgattgattatattttgaagcatcaagatacactacaaatttgtgatataccaaacggcacgaaggaacttctaaattgggtcaatacgcatgttaacgatcgaatgcttaatgtcccgggaaataaatctatcataagttactttaatgaagttgtctcacgacaaggtaatcatgttgcgctagtcatgaatgatttgacaatgacgtatgaaacattacgcaactatgtggatgccattgcgcacatgctcctatcaaatggtgtgggcaatggtcaacgggttgccttgtttacagaacgtagttttgaaatgattgcggcgatgttggcgacagttaaagtaggtgcatcttatatacctatcgatattgattttccgaataaacgacaaggtgcaattttggaggatgctaaagtaactgcagtcatgtcttacggcgttgaaattgaaacgacattaccagtcattcaattggaaaatgctaaaggctttgttgaatcaaaggaaaatgaacaatatgatgatttacatggcaatcaacttgaaaacacagcgatgttagataatgagatgtatgctatttacacatctggtacgaccgggatgcctaaaggggttgccatacgacaacgaaatttgttgaatttagtgcatgcatggtcaactgaattgcaattaggcgacaatgaagtatttttgcaacatgcaaatattgtttttgatgcatcagttatggagatttattgttgtttgttaaatggtcatacgcttgtgattccagatagagaggaacgtgttaatccagaacagttacaacaactcattaataagcatcgtgtgacggttgcgtcgattccgttacagatgtgtagtgttatggaagacttttatattgaaaagttgattacaggcggggcaactagtacggcatcctttgttaaatatattgagaagcattgtggcacgtatttcaatgcctatggaccatctgagtcaacagtcatcacatcgtattggtcacatcattgtggtgatttgatacctgagacgattccaattggcaaacccttatctaacatccaagtgtatattatgtcagatggtttgttatgcggtattggtatgccaggcgagttgtgtattgcaggtgatagtttagcgataggatatattaatcgtccagaattaatggctgataaatggcaaaataatccatttggtaaaggaaagttgtatcatagtggtgatttagcacgttatacatctgatggtcaaattgaatttttaggaagaatagataaacaagtgaaagttaacgggtaccgtattgaacttgatgaaattgaaaatgcaatattagctattcgtggtatatctgattgtgttgtaacagtaagtcactttgatacgcatgatatattgaatgcttattatgtcggagagcaacaagtggaacaggatttgaagcaatatttaaatgatcagctgcctaagtatatgattcctaagactataacgcatatcgattgtatgccattaaccacgaatgacaaggtggatactacgcgtttgccaaatccatcacctatacaacagtctaataaagtgtatagcgaaccctctaatgaaattgagcagacatttgttgatgtatttggagaggtattgaaacaaaatgatgtcggtgttgacgatgatttctttgaacttggtggtaactcattagaggcgatgttagttgtctcgcatttaaaacgatttggccatcatatttcaatgcagacattataccaatataaaaccgtgcgacagattgttaattatatgtaccaaaatcaacaatcattagttgcattaccggataatctttcggaattacaaaagattgttatgtctcgttataacttgggtattttagaggatagtctaagtcatcgacctctaggaaatacactattgactggcgcgacaggttttttaggtgcttatctgattgaagtactacaaggatacagtcatcgcatttattgtttcatacgtgctgataatgaggaaatagcatggtataagttgatgacgaatttaaatgattatttttcagaagagacggttgaaataatgttatcaaacattgaagtcattgttggtgatttcgagtgtatggatgatgttgttttaccagaaaacatggatacgattattcatgcaggtgctcgtacagatcactttggtgatgatgatgaatttgaaaaagtaaatgttcaaggtactgttgatgtcatacgtttggcacaacaacatcatgcaaggttaatatatgtgtctacgataagtgtgggaacttattttgatatagacacagaagatgtgacattttcagaagcggatgtctataaagggcaactactaacatcaccatatacacggagcaaattttatagtgaattaaaagtattagaagctgtaaataatggcttagatggtcggattgtacgtgttggtaatttgacgaatccttacaatggaagatggcatatgagaaatataaagactaaccgtttttcaatggtaatgaatgatttgttacaactggattgtatcggggttagcatggctgaaatgcctgtagatttttcttttgtggatacgactgcaagacaaattgtcgcattagcacaggtcaacacaccacaaatcatttaccatgtgctatcacctaataaaatgccggtgaaatctttgttagaatgcgttaagcgcaaagaaattgaactcgtcagcgatgaatcatttaatgaaattttacagaaacaagacatgtacgaaacgattggattaactagtgttgaccgtgaacaacaactagcaatgatagatacaacattaacattaaaaataatgaatcacatcagtgaaaaatggccaacgataactaacaattggctgtatcattgggcacaatatatcaaaacaatattcaataagtaagtagggaaagttatgacagtatttgtaatgcaattacagagtaacttgaaaagtattgaagaattaatatcacaaagtcgttggtcatataaaaaaccgcgtacagtcaactatagatacaatcaagataaactcatgcacagattgggagatattttagtgcaatatggaattcaacatgacacaggtttattaccacatgaatggcattatcacatttcgccacgaggtaaggcagatattgttcaacacaatcgtgatggacagcccatctatgtgagcttatcatatagttatccttatatcgtgtgtgttgtcgataaagaaccagttggtattgatatcgaaaagatatcacaacgtttagactggcgtacgttagtgacgtgtttctctacaaacgaagcacatcaaatatgtagtttaaatgatttttatcaaatatggacacaaaaagaaagttttacaaaattgattggtgaaggtttaatcaaaggattggacatttatgatatgacacaatcacacttttatcaatcacgtgaagtgaagttcaaacaatttatttttgatcagtttatggtacaggtatgtttcttaggacaggcaccctggggttataaaaaagtgtctgtatttcagttattgagtagttaatatgacgtctgacagtatcattgcgcagtgattttaaactatactgcctaaatgtttactgttagatgtttttttattggaaaaatgaaaggtgaatacacgatggcatcattcaaaatcatgacgagattaaagtaagtgataaggtaaaaatatactgagcaatattgaaattaccgaaaataatagtttgttacgacgcatttgagactttaatgctcacgtaagttggctggaatcatatcatgtcagttaataaaataacgtgagcatcaatcatcatactcaaacgatgatttaaaactcacgttaatgttagtcagtgtattaatttaatttatagcgatagacaaaatgttgtcgcactaattcaattgtcatcatccagacgatatggccaaagaattctgacagatgctcttggaatggttgatcccacacagcaggtacagtatgcatgattggcataatgataaggtggaataatacccaaatagcaataccaaaaacagcaccttgtcccattgctaagtaagcgtattttttaactaatatgcagtaaataattgcaatgacgatagaaaaactaaagtggacaataaagcttacccaaggcaattccatatttgaaaatgtatatgtttgatgcgtaaactcactactaaatcctaattgttgcaataactcttgaggtgggttcgttgcattacgttctggtgtgcgaggtggaaacatgacctcccaacctaattttacaattccagataacaagccaccgataattccagcataaatgaatatacccatttgtcgtttcgtcaacttaaggactcctctctatttactatcctcattatagtattttgtgaaaataatcacaataaaaagctttgcaaaacttaaaatattttgataaacaaatttgtaaaaggttattagtttttttacatctcatattgtatcgtactgtattcaaaattgttaacgagatgaacggtaaataaatgttttagcgcaatggataatcgaactggaatcatctcgcgtgtcaaaacttgttaggccttaatttcatagttatgaattaaggattgttgtgccaacaaaatcattattgtaaatagattcaatgatatttggcttgtttcctgatgcaatgataactttaggacagccattttcaatcgcatttttggcatctagcactttgggaatcatacctccataaatatcaccatgttcaatatattgatgaatatcgactaatggcaattgaggtataacaacatcattgatgagtacacctgcaatattacttaatacataaataggcgcttttaatgatgatgcaataaaataggcaagcgtgtcagcattaatattgtaaaattctccatcatggttattgaaaccaatcgaattgatgataggtacaaatttagtacataaatactgtaaagcatccttatttaaagcggtcggaacaccgacatatccatattgttgatcaaaagatgtaatttcaaacagctgtgcatccaaaccacataagcctattgcagaacattggtgctggttaaattgagctactaatgcagtgttaacgtctgcaatgagcgtgtgtttagtaatggtcatggttgctttatcagtcactcttaggccattaacaaagtgtggctcgatttgctggtttgataatgcttcattaataaatgggccaccgccatgaacgataatggggtagatgttgtttgatcgtaaatgcttaatgttgttaataattgatggatgcatgtcactaagtgtactgccaccaattttaatgacaataaatttcatctaaccaacaccaccttatgttcgatatgatgcgttgatacgcacataatcataggataaatcacaaccgtatgcagtcgctgcagcgttacctaaaccaagctgaacgtcaattgtgacattttcatgagttaatgtattcgacatagcttgctcatcaaatagtacagccatacctttatcaacgacaggtatttggttcagttgaacatatgtgcagttaggatcaatttcacatccgctgtagccaatagctgtaatgattcgaccaaaattggcatcttcgccaaaaatagctgattttactagatttgaacttacgatagttttaccgatttttcttgcatctgatattgatttagcgcctgacacattgacgctgattaactttgttgcgccttcgccatctctggctatagctttagctaaaaatgtacagacaaaattgaatgcatcaacaaatgtttcccattgtggatggtcttgactaagtatttggtgttcaacttggtgatttgccatgactaataccatgtcatttgtacttgtatcgccatcaacagtaatcatattaaatgtatggtcagtcgaagattttaataattgatgaagtgtattcgattcaatcgatgcatcggttgttataaaagcaagcatggtagccatatttgggtgaatcatacctgaacctttggtgctaccaccaattgtaacggttttaccatcgatttttagtgatacagcgatatgttttgtacaggtatcagttgttaaaattgcctcgttaaacgcacctggcgttgcaaaattagcatccttaatatgttcggtcccagtcttaattttatccataggcaaatattcaccaatgaccccagttgaagcaacagcaacatgctcagatggtatttgaagttgttgagcaacccatgtttgtgtttgtcgtgcatcatctatgccttgttgaccggtacaagaatttgcattagctgaattaacaacaagtgcttgtaattttcctttagacttttgtaaagtgtcttcagtgacaataagtggtgcagctttaaactgatttaaagtatatacggcagctgcacttgccaaagacgatgagtaaatccacccaaagtcttttttgttagcgcgtaaaccgatgtgcataccaccagccgtgaagccttgaggtgtactgatatcgccatgtttaataattgaaaagttatattgttgtgatgtcgtttcttgatgtttcattctaacaccccttatggataaactggtgattgatttaggccagtcgtcacttcaaaatcatataatatatttaaattttgaatggcttgcccacttgcgcctttgacaaggttatcaatcactgatactaaaattgctgtttgcgttgtttcatctacatagatgccgatatcgcagtagttactaccgagtacttcttttgtggttggaaaagtcccaatatctctaattctgacaaatggctgattagcataataagaggtcattaatttatgtaatgattcagtcgtatattcagatgataatttgacatatattgttgataaaatacctcgtgtcattggtacgagatgtggtgtaaatatgactgatacatcttgacccgcaatgatagataaatattgctcgatttccggtttgtgtttatggtttccgattgcataagcgcttagattttcattcatttctgaaaaatgaacacgttgtgataatgaacgaccagcacctgacacgccggtcttagcatcaataataatagatgacaaatctactattttttcgctaataagtggatgtaatgctaataatgttgctgtagggaaacagccaggattagaaatgagcttcgttccattgttatcaaacgattgccattctgaaatgctgtaaatagcatgattcaaatcatcttgtgctgcagcagtttctttgtaatatgcttcatatatttcacgattcttaattctaaatgcgccagataaatcgataacatgaatacctttttctactaagggagggatacatgttttacttacgggtgctggtgtcgcaaagaaaattacatcacagtcattattgtccactgtaagtgcttcgaaatgttgcataatatgttgtaaatgtggaaatgttaatttcaacggttcatctacttttgaatgtgagtagatgtgtgcaatcgttacatgaggatgtgtttgtaacaatcgaattaattcaattgcgccataaccgctaccgccaacgatacctactttaatcatcatgaatccctcctatgtcatatataaatgattaattgttaatttttaaaaacgtcttgaaaagctgcaacaatttgatggatttcctctttatcaatgactagaggtggagacaatcgaatgatagtacgatgcgtgtctttgcataagattccacgttgaatcagttgatccacaaaaggtgcagcatctgtgttaagctctatgcctataaataaaccacgacctctaatttctttaatactaggatgtttaagttgtagcaacgcttttaataaaaatgaacctaagcgttctgatcgttcaaccagttgttcatctttaagtacatcaagcgctgccgtcgatattgcaatggctaaagggttaccaccaaatgttgaaccatgtgtacctggtgttagaatacgcatgacatcattatttgcaagtacagcagatacagggtataagccgccacccaatgccttacctaaaatataaatgtctggaacgacttgctcccattccatagcaaaccatttcccagttctaccaagaccaacttgaatttcatctgcaatcaataatatttgatgtttatcacatagttgacgcacagcttgaatatatcctttcggtggtatattaacgccaccttcaccttgaattggttccaaaataattgctgctgtattcggtgaaatagcttgtgttaattgttcaatgtctccaaaatctactgttgtagtgccttgaagtagggggtgaaatcctgctttatatgcgtcgtggttagatagtgataatgagccaagtgtacgaccgtgaaaattgttattcatagcgatgatttcaacttgtccgtcagtaatgcctttaacttcagagccccattttctagcaattttaatggctgcttcaacagcttcagtaccagagttaagggggagtactttgtctttcttagcaagatgacaaattttttcttcccatttcccgagattgtcactataaaggacacgtgaaatgatagacaactttgaagcttgttctgtcatcgctttaacaattgttggatgacaatggccttggtttgcaactgaaaaacccgaaatgcaatctatatattgtttgccatcagtatcccaaactttgacacctttacctttagaaatgacaagcttaagtggtgcataattattagagctataataatcagttaattcaatgattgaattcatcggtctccctcctttatatttatacattttaaagaattaatattaatatattacagttgttcaatataagtgtcaaatgtaaatttaataatataaagataaggttgtgtttgtattaatgtgatttgtaaaatgaaagtactaatattttttgtggataatcattgatatgtatgtatacgattgcagtttaatgtagtatgaataaaaaatgccacaagcatatgtttaacatatgactgtggcatagtattatgcttgtggaattttacgatgcttaattttataaataatgaagccgataatgaaaccaatcaaactgagaacaacccagcccataccaatgtctgataatggtaaatatttttggctgaaattaatcaaagtttgtgagaatgatgtgcttgaaatgaactctggactagcttttaatccatctactaatgcagcaatcattgtaaagaaaatggtacattgataaataagttttgaatgatggaatttgctactaaataatgttagtacaatcaaggcaattgctaatggatataagaacattaacactgggactgagtacataataatcttagttaaaccaacattcgcgaataagaacgaaataaagcttacaactgttgcaatcgctaggtaattcattttagggaaaaggtgttcgaatgtttctgaaaatgccgtaatcaaaccgatggctgtttttaaacaagcaaccataacgataagtgacaacaggacgataccgtagttacctaagtagtattgagtaatttgcgctaaggcaataccaccattttcactaagtttgaaatgaccaatacttaatgtacccatgattgctagtagggtataaatgatccccatcataatgatactgatagtaccagacttaattgtttctttagcgatatcagttggattttcgatacctaactttttaatcgttgcaacaatgataataccaaatgccaatgacgctagcgcatctaaggtattgtatccatctaaaaagccgttaaataaggcatgtgattgatattgtttactaataggtgcatcagatatgccacctaatggatggataaaagcaaataataaaataattgctaataatactaagaataccggatttaaaaatttaccgatatattctaaaattcttgatggctttctcgcaaaaaaccatgcaatcacaaagaagacgaagctaaaaataaataaatataaagtgatttgctttggtgataaaaatggcgaaaatgcaatttcaaatgatgtcgttgccagtctaggtaaggcgaaaaatggtccgataactagatataaggcaatcgtgaaaatgtaagcatatgttttattaacacgcgatgcaatttcaaataaaccagatgtctttgaaatgccaatagcaatgatacctagaaatggtaagccaattgctgtaattaaaaatcctaagttagcgataaaaacgttagaaccagcagcttgacccaagtgtattgggaagataagattgccggcaccaaagaataaaccaaataacatagaacctataaacatgttttctttaaatgttagtttcttcttcatatatgtatttgttctcctttttagaacttataaaaatctacttaattaagataatatcaaaaattaaacataaagtgatacataattttgcaataaatactaaattttttgaaaattccggaataaatactgttttttatgtagtaggggcgtaagttaagaacgatttaacagatatagaatatgttaaatatagaaggttagacaacccgacgtattaatactttgtgaaataaagatccccctcaacatgatcgaagggggaagtatatgtttagttcaatatatttagaaagtcgtttgtagttattgtttgtcccatcaatgggaatacattatctattggaaattgatgtagcgtttcgttttgtgcactcatcatatctgtaacaaaaaactgattgtagtttaattgataggcatctcgcgctgtcgtatctacgccaatatgcgttgcgacaccaccaagaacaatcgtatcaattcctcgacgtcgcaattgtaagtccaaatctgttcctacaaatgcactaaaatgtcgtttgtctatgacaaaatcgtcatctctcttgtctaataaatgatggaaacgactgtagtcgtcgccttcttttggtggtaatgagatcattgcatttggttgcaatacatctttaccatcatagaaattcacgcgaacaaaagcgataaagccattgttttttctaaaaacatctattaatttattagcgttttgaacgacattttcagctgtatatggggcataatccattttaagaataccttcttgcaggtcgattaacactaaagcggttttattaaaattaatcatcttatatcagagtcctattcgtttaataaagtattcgcttaaacttataccctgtatacgatgaaattatttattttgttgtgaaaaagctttagcgatatcgatgagtttcttcggtgcgtcttcgacagccattttgacttcgacaaaatgcatcacatcgggatgaccattaattgcattaaacgtgtcttgtaaatcttttgatgattcaacgtcatgaatttcaacatttttaccaccaaatacagctggtaaagctttataatcccacatgtgaatttcattataaggttcatacatgccgtgaataagtcgttctaccgtatagccgtcattattaatcacaaataataccggtttaatatgctgtctaatcatagttgaaatagcttgaacagttagttgcaatgagccatcaccaattaataataagttacgacgatctttgtctgctaattgtgaacctaatgttgcaggtaatgtatagccgatagaaccccataacggttgccctataaaagtattgtttttgtataatgctaaatcataagcaccaaagaatgatgtaccttgatcagcaatgatgacatcatttggttttaagaaattttgcatcattttaaaataagtttgttgtgttaatggttctgtgccaacagtataatcgggtgatgttggacgatgatacgcagggaacgttgcgttattcgtatatgaaatattggataactgttttaacaatgatggtagagatatttcatcatttgtaacatcgtcaattttgatattgtgatgatttaacataacgacatcatcgatattgaattggtatgaaaaacctgctgttgctgaatctgttaatttggctccaatatttaaaattaaatcgctgttgtccacataatctcgtattttatcttcggcaattttcccatcgtaaatacccatataatatggattttcctcattaaaagcaccttttcctaatgaaagttgtgctactggtatctgtgtttgatttacaaaatcttctaattcttgatggaggtgaaaactgttaatttcatgtccagtaatgatgataggctgcttcgcttgatgcagtttagttgctaataactctatatatgttgatgcatccgtatatttagttgccgtcacttcaaatggtgtcggtatctcaatttcagagattgcgacatcgattggtaaatgtaaatgaactgggcgtctttcggcgattgctgtattaattaaacgtggtatttcggttgttgcattttcaggtgtgatataaccttgtgcaacggttatatgtgcaaacatttttcgatagtcgtcaaatgtaccttcaccaagtgagtgatgtacatatttaccgccttgttcaacagcacgtgtcggcgcacctgtaatcgcaatgacaggtatgcgttcagcatatgaacctgcgataccgttgacggcacttaattcgccaacaccaaatgtagtaactaatgcagcgagtccattaagacgggcataaccgtccgctgcgtaacttgcgtttaattcatttgtatttcctacccaatctacattgggattgctgataatatcgtctagaaaagcgagattaaaatcaccaggaacaccaaaaattttatcgacgcctgctcgatgaatagcgtcaattaagtaagctccaatgcgttgtttcataaaaaaagccaccttttctctatatttacacttaaaatgatagcctcgaatatagtgtaaggtcaaggaagttgactttgttgtgaaaacgataacaatagtgaacaattaatattttttaggaaatgagtatgaaggggggctttaattgatgatcttaaaattcaaaatttaaggggagagcgaactatcaatgatgctgcaaaatacaatagcaaagaaaaaacaggcgcgtcaccttatgaaggtatacgcacctgtttatagtaagcattatttagcttcaaataattgatcgccaaatgaaatgttgccatgttcaccttgtttaaaatcaaggtttgtaatgtttccttgtgtcacgataataggcgtaatatcactctttgcatgattgcggatgtagtctaaatcaaagttgattaataaatcaccttgtttaacttcttgaccttcctcaacatgtaaagtaaagccttctccgtttaatttaacagtgtctaaaccgatgtggattaatagttctaaaccactatctgatacaagaccaattgcatgttttgttgggaaaatcatttgtactttaccgttgaatggtgcacgaacttcaccttgtgaaggtttgatagcgataccgtcacccatcattttttcgctgaacacttgatcaggcacttctgataatggtgttacttcaccagttaatggtgcatgcacgatatggctcaattcgcttgttgcagatttatcttctgcaacaacaacagtttcgtctttatcgtcttccatagtagtaggattttctactacttgaccattcataatctgttgcatttcatgtttgatttggtcagatttaggaccaaaaattgcttgcatattattgccgacttctaatacaccagatgcgcctaaatctttcaaaccaggaacatcaactttagatttgtcgttaacttcaacacgtagacgtgtgatacaagcgtctaaatgtttaatgtttgctttgccacccatagcttctaatactgcatatggtaattcagttgctgaagcagtagccgcttgtgattgtttatcttcacgacctggtgttttgtattttaattttacaattaagaatcggaatacgaagtagtaaataactgcgtatacaagacctacaggaatgactaaccaccattgtgtcttattaggtagtataccgagtaagaagtagtcgatgaaaccacctgagaatgtataacctagatgaagatctaataagtacaatgttaagaatgataaaccatcaagtactgcgtgaataaagaataataatggtgctacaaataagaatgagaattctaatggttctgtaataccagttaagaatgatgttaaagcagcagaacccattaaacctgctactactttcttattttcaggtttagctgtgtgataaattgctaaagctgctgcaggtaaaccgaacatcataacagggaattcaccttgcatgaatttaccagctgtcaaatgtgcgccttcacgaatttgttcgataaagatacgttggtcaccgtgaataatttcaccagctgcatttttccatgaaccaaactcgaaccagaacggtgcgtggaaaatgtgatgtagaccgaatggaattaataaacgcttgatgaaaccaaataagaatacggcaacaccagtatttgaatctaataatcctgtactgaatgcatttaatcctgattgaatcgttggccaaattaatgccattgggaatgctaaaataaatgatgttgtagccatcataataggtacgaaacgcttaccagcgaagaaacctaaataagatggtaagttaatgttatagaacttgttataacaccaagctgccagggccccgattataataccgccgaacacacctgtttgtaatgttgggatacctaaaatgctagcgtaaccactcgctggatcaccaatattcttaggtgtaacttgtaaaaagtcgcccattgttttgttcatgattatgtaaccgacgaatgctgcgatagctgctacgccatcaccgccagctaatccgattgcgacacctaatgcgaaaatcataggcaagttatcaaaaatgataccaccagcacctgtcattaatttagcgacagtttgtacgccaccattttgtataaacggcaagtagtgttgtaatgattcaccttgcatagctgtaccgatagctaataacagaccagctgctggtaaaatcgcaacaggtaacattagcgctttaccaatacgttgcaattgaccgaaaagtttcttcctcacttgtccaacctccaaagttgtatttattatttaagattcaataaaaaaagacacgagcaaatagactgtgttggtaaccatcacagcttaatttaactcatgcctaatcttacttagtaacacgttggtgtatgtaattaatgtaaaagaagcaattgactaagtagtatataaaactgatacgttagtttatctagcttaccatcacatcttattgaatcttatttgtttgcgactcctattttagcatggtgaagtatgcgttttcaatacaattattaaattcaatttcaaatctcttaattgttcacagattattattaaaacataatataagataatcctgaataaaatgtataaaagttattgtaataatccagcagtagcagctattatcagcacttaaaagaaaggataatctttgatggtgtaataattaacttgtgacagaaatatgtaagattattacaatgaacaggctttaactgattaatattgtaatgtgttttctcttatagtaaaatgtaagcgattacacaactcaactatattttcctaataattatattgttaaggagggctactttgacaggcttttcagtgtatttaggacaacctttagatgaagcgtatattaagcgaatgattaaacaaggttaccaaatgatttttacatctgtacaaataccagaagaagatgacgagacaaaatatcattatttcacaaaactactcaatttattaaaacatgaacaagtgacttacctcatagatgctaatccatctattttaacaccatctttttatgaccatcttcgacaatatgatgcacaatttatgattcgtatcgatcatagtacatcaattgaggcaatcgaagcgataatggcacagggtttaaagtgctgtttgaatgcaagtattatttcccgggaattgttaacaagcttacatcaacaattgaatgattttacattactttcattttgtcataactattatccaagaccagatacgggattatctgttgacttggtcaataagaaaaatgaactcatttatcaatttaatccaaaggcacaaatatatggttttattgtagggagtgatttgcgaggtcctttgcataaaggcttgccaacaattgaagcaacgagacatagtcatcctgtcgttgcagctaaattattacaagaaactggtgtatctgaagtgttagttggagactcattgattgaaatgaggcaggcaaaacaacttatagatttttgcaagcataggcatttcacgttatgtattgaagaagtgtttgatacgacagtgacttaccttttcgatatgtgtcataaagtacgcccggataatccggaaaatgtcattcgttcggaaacgtcaagacaaatatgtccacattcgattcaaccacagtttacgacgcaacgacgcattggttcagtaaccgttgataatttgaataacggacgttatcaaggcgaaatgcaaattgtgagacaaacgcttagtgcacatgacaatgtgaatgttgttgcacaaattattaaagaagacttaccactgttaagttgtatcgagccgaatgatacatttgattttcaaaaaactagggagtgtaagaagtgatggaaaatagtacgaccgaagcgcgtaatgaagcgacgatgcatcttgatgaaatgactgtggaagaggctttaattacgatgaataaagaagatcagcaagtcccgttagcagttcgaaaggcaataccacaattgacaaaagtaattaaaaaaacaattgcacagtataaaaagggtggacgattgatttatatcggtgcaggtacaagtggaaggttgggtgtcttagatgcagcggagtgtgtacctacattcaatactgaccctcatgaaattataggtattattgctggtggacaacatgctatgacgatggctgtagaaggtgcggaagatcacaaaaaattagcggaagaagatttgaaaaatatagatttaacatcaaaagatgtcgttataggaattgccgcgagtggcaaaacgccatatgttataggcggtttaacatttgctaacacaatcggtgctacaacagtatctatttcatgcaatgaacatgcagttataagtgaaattgcgcagtatctagtagaagttaaagttggtccagaagtattaactggttcaacacgtttaaagtctggtacagcacaaaagttaattttaaatatgatttcaaccatcacaatggttggtgtcggaaaagtttacgataacctcatgattgatgttaaagcaaccaatcaaaaactgatcgaccgttcagtgcgtattattcaagaaatatgtgctatcacatatgatgaagcaatggcgttatatcaggtatctgagcatgatgtgaaagttgcgacagttatgggtatgtgtggcatttctaaggaagaagcaacaagacggttattaaacaatggtgacattgttaaacgagcaatcagagatagacaaccttaggagggatttaaatgaccaaagaacaacaacttgcagaacgaattattgctgcagtaggtggtatggataatatagatagtgtcatgaactgtatgacacgtgtgcgtattaaagtattagatgagaataaagtagatgaccaagaactaaggcatattgatggtgtcatgggtgttatacacgatgaacgcattcaagttgtggttggacctggtacagtcaataaagtggctaatcatatggcggaattaagtggtgttaaactaggtgacccaataccacaccatcacaatgatagtgaaaaaatggactataaatcatatgcagctgataaagcaaaggcgaataaggaagcgcataaagcaaaacaaaagaatggtaagttgaataaagtattgaaatcaattgccaatatctttataccgttgattcctgcatttattggagctggattaattggtggtattgcagcagtactgagtaacttaatggtggcaggctatatttcaggtgcttggattacgcaacttataacagtatttaatgtcattaaagacggtatgttagcatacttagctattttcactggtattaatgcggctaaagaatttggtgcgacaccaggacttggtggcgtgattggtggtacaacgttattaacgggtattgctggtaaaaatattttaatgaatgtcttcactggagaaccattgcaacctggacaaggtgggattattggcgttatttttgccgtttggattttaagtattgtcgaaaagagattacataaaattgtgccaaatgcgattgatattattgtaacgccgactattgcattgttgattgtaggactattaactatctttatctttatgccattagcaggttttgtttcagacagtttagtttcagtagttaacggaattattagtattggtggcgtatttagtggatttatcattggtgcaagcttcctaccgttagttatgttagggcttcatcatatttttacgccaattcatatagaaatgattaaccaatcaggtgctacttacttattgccaattgcagcgatggctggtgctggacaagtaggtgccgcattagcactttgggtaagatgtaaacgcaacacaacattacgtaatactttaaaaggtgcattgccagttggtttcctaggtatcggagaaccattaatctatggtgtgactttgccattaggtcgacctttcttaactgcttgtattggtggtggtattggtggcgctgtaataggtggaattggacatattggtgccaaagcaataggcccaagtggtgtgtcactattaccattaatctcagataatatgtatttaggttatattgcaggattacttgctgcgtatgctggtggattcgtttgtacatatttatttggaacgacaaaggcgatgcgacagacagatttgttgggtgattaatgatgacaaatattttatatcgcattgataagcagttgagtgattttacgaagacagaaaagataatcgctgattacattttaaagaatccacataaaatcattgatatgactgtgaatgatttggcagatgttacgaatgttagtacagcatcaattgttagatttagtcggaaaatgacacatcaaggttttcaagagctaaagattgcgatatctcgatacttacccgaagatattgcaaccaatccacatttagaattgattgaaaatgaatctgtagaaactttgaaaaataaaatgattgctagagcaacgaatacgatgcgatttgtagctactaatattatggatgcgcaaattgatgcaatttgtgatgtgttgaaaaatgccaggacaatatttttatttggatttggcgcatcgagtttgactattggtgatctttttcaaaagttatctcgtattggcttaaatgtcaggttattacatgaaacgcatttacttgtgtcaacatttgcgacgcatgatgatagagattgcatgatttttgtgacgaatcaaggtagtcatagtgaattgcagtcaattgcacaggtggccacacattacagtattcccatcataactatatctagtacagctaataatccagtggctcaaattgcagactatgcattgatttatggcagaactgatgaaaatgaaatgcgtatggcggctacaacgtcactatttgcacagttattcacggtagatatattgtactatcgatttgtagcattaaattatcatgcgattctagattgtataacccaatcgaaaatggcacttgataattacaggaagcatcttgcgacgatagattttaaacattagatattgtgtgcgttctaacataaagttagttgcaacgtaaacaattgaagtttttgatgtgattcagttgcttgatgaaaaattgttgctacaagtttgtaaaactggcatagaggctattttgaaaatgataaaggcgtgacaaattaaagcaaagttcagatttgagctttgcttttttcatagatggaaattaaatgctgaagaataattttaatgctaaatgaactaatacgaaggtgctaaaagcaattattatcaaattagtgatatgaatgaaatgtttaaatcgtttgcgttgattgtattcgggacttttatagagtaggtagtagtacataaagagtatggctgcgaacatgccgaatattgaagtgaagttacctacagtgactgccatgtaatgatttaaagctaaatagtaacttagactaataataaaaaataaaatgatttgataggtaattaacaccattcaagtccctccattaatcgtagacaaaaaatttatcaatgatttgattatttgtattcaaattttagtatacgacttacctcaaagacaaatattaaaagataagacaataaaattagaataaatttacgtttgaagataaaaaacaaacatttttcattaaagtttatgatatatttagagcaatagaaagtgtatggaaggggatatgaatggcataccaaagtgaatacgcattagaaaatgaaatgatgaatcaacttgaacaattgggttacgaaagagtaacgatacgtgataataagcaattgcttgataattttagaacgattttaaatgagcgtcatgcggacaaattagaaggcaatcccttaacagataaagaatttcaacgtctgttaacgatgattgatggaaaaagtattttcgagagtgcccgtattttacgtgataaattaccacttagacgtgatgatgagtctgagatttatttgtcgtttttagatacgaaaagttggtgtaaaaataagtttcaagtgacgaatcaagtatctgtcgaggatacatataaagcacgttatgatgtaacgatattaatcaacggactaccccttgtccaagttgaattgaaacgtcgaggtattgatattaatgaggcgtttaaccaagtaaaacgttaccgcaaacaaaattacacaggcttattccgctacatacaaatgtttatcattagtaatggtgttgaaacgcgatacttttctaataatgatagcgaactattgaagagtcacatgttttattggagtgataaacagaataaccgtatcaatacattgcaatcgtttgctgagtcatttatgagaccttgtcaattagctaagatgatatcgcgctatatgattattaatgaaacagatagaatactgatggcaatgcgtccgtatcaagtgtatgcggtagaagcacttattcaacaagcgactgagacagggaataatggatatgtatggcatacaactggaagtggtaagacgttgacttcttttaaagcgagtcagattttatcacagcaagatgacattaagaaagttatctttttggttgaccgtaaagacttggatagtcaaacagaagaggaatttaataaatttgctaagggtgctgtagacaaaacttttaatacctcgcaactggtacgccaactaaatgataaaagtttgccacttattgtaacgacgattcaaaaaatggctaaagcgattcaagggaatgcccctttattagaacagtataaaacgaataaagttgtatttattattgatgagtgtcatcgcagtcaatttggtgacatgcatcgtctagttaaacaacatttcaaaaatgcccaatactttggattcactggtacgccacgttttccagaaaatagtagtcaagatggtagaacaactgcagatattttcggtagatgcttacatacgtatttaattagagatgccattcatgatggtaatgtacttggtttctcagttgactatattaatacttttaaaaataaagctttaaaagcagaagataacagcatggttgaagcaattgatacggaagaagtatggttagcggataaacgtgtggaattagtaacacgacatatcatcaataatcatgataaatatacacgtaatcgtcaatattcaagtatatttacagtccaaagtattcacgcgcttattaaatattatgagacatttaagcgacttaacaaaaagttggaacaaccgttaacgatagctggtatatttacgtttaaacctaatgaagatgatcgtgatggtgaagtgccatatcattcacgtgaaaaattagagataatgattagtgattataataaaaagttcgagacgaatttttcaacagacacaactaatgagtattttaatcatatttcaaaaaacgttaaaaagggcgttaaagatagtaaaattgatatcttaatcgttgttaatatgttcttaactggttttgatagtaaagtactgaacactttatatgttgataagaatttaatgtatcatgatttaattcaagcgtattcacgtacaaatagggttgaaaaagaatcaaagccatttggtaaaattgtaaactatcgtgacttgaaaaaagagacagacgatgcactgagagtattctcacaaacaaatgatacggatacaattttaatgcgcagttatgaagagtataaaaaagaatttatggacgcttatcgtgagcttaaaatgattgtgccgacaccacacatggttgatgacattcaagatgaagaagagctaaagcgctttgttgaagcttatcgtttattagctaaaataatattacgtttaaaagcatttgacgagtttgagtttacaattgatgaaattggaatggatgaacaagagaatgaagactataaaagtaaatatttagctgtgtacgatcaagtaaaaagagcgacggctgagaaaaataaagtatccattttaaatgatattgatttcgaaatagaaatggtgcgtaatgatacgattaatgtgaattatattatgaatatattgagacaaattgatcttgaagacaaagcggaacaacgtcgtaaccaagaacaaattagacgcattttagatcatgcagatgatccgacattgaggttaaaacgagatctaattagagaattcatcgacaatgttgtaccttctttaaataaggatgatgatatcgatcaagaatatgttaatttcgaaagtattaaaaaagaagcggagttcaaaggatttgctggagagagatctatcgatgaacaagccctaaaaacaatttcaaatgactaccagtatagtggtgttgtaaacccacatcaccttaaaaaaatgattggtgatttgccattgaaagaaaagcgtaaagcaagaaaagccattgaatctttcgtggcagaaacaactgaaaaatacggtgtgtaatgattcagccccctcgctagattagtgtagggggcattattattttctatcttttgttagttaccatgtgtttggcaaccatcatttggtttcaatacaattttataatcgtatgtgtatagaaataatgtctataggcatttaaaatagtttataatattaacaggataagtattaaatgtatgttgaaggaggtgcgtagctatggataatagaaatatgattaatcgtgtttttagtcaaaagatattacatcaaattgcaatcaaaaataaaagtgatgttgttgatgaggcatatgatttttatatacagggacctaaaaatatcaatgtaatacagaagatgaaatctttatataactatcttaaaaagtcttatcgtaacgaatatttttacaaaaacacaatacttaataaactccttctaggacgacattctattaatacaactactgcactttctgagatgcccatagggaaaagtattgctgattttatattgttaaacggcaaaggcgttgtctatgagattaaaacagaattagataagctggatagattagataatcaaattaatgattattatgaagtgtttaattatgtcgtagttattacaaatgacaaacatctgaataaagttatggctagatacaaagatacaacagttggaattttagtgttaacaactagaaatacactgagtgaagttcaaaaacctaaagaaaacaatagtctcttaaacacaaaagcgatgtacaactttttacgaaaagaagaaagaaaaagagttattgcacaaaatcatatggatgtgccaacttataatgatttcacagagtatgatgtgttatttgacgtgtttaaagaaataccaatgacgaaactgcataacaatatgatttctgagttgaaaaaaagaggaaacatgaaagaatacaaagatgaatttttagcagcgccggctgaaattaagttcttgttatatttcgcaaaaatgacaaagaaagataaaaataaactatatcattttcttaaggaggattaatatgtattatccttatttgcgtgggaaacaaaatgaactatttgcaattagagaattgttagagaaaggtttgattggtgattgtattcaacctataattgaaccaattaaatatacaaccacatttaaaaatactttgcaatactgtggtgaaaaagcattctctataaatttagtagtaaattcaaagttaactgaagaagagattagtaacgaaactgttgcacatttaactgaaataataacaaaaaacaaaagtgttattcaaaaagcttacttgggtccttctgatgaaggcaatgataggttgaaacagcaattttcaagtaatagtttagctattttaacaagtgtagatgattgggaaatgtttggagataaaaataaacttgaaatggtttttgtaccagatgatagacacattaaacgtaaattgcgtaatattccaaacaaaggcatcattatggatccttttaataaactaagtcgtaatgttgattatttagataatgatgacgagttttatagcgacgatcacctttattataaggaagatggatacgtagcattttcagactattctgttataggtggagaatatgtagacggtggcttttcgccattagctattgcgatacatattgtctattttgatgaggctaatgagctaagagttaagcattttgtctctgattctaataatgatagatcaaatccaggtaaaaagttttttgaggctgtagataaattagtaacatggtcaaaaaacttagatattaaaaatagatcttatgcgcttggacaatttgaagaattaaatgaaaataataagtatccaggattaggtttaattaaaaggttatctatcatgcatcacctagaaattatgaatagatacttggagtctcaaaatgaaaatatgtgaaaaatgttttaataatactgaaatcgtagaaatcattgcaaatgataatagcaaatttgacaattgtgatattgataacaatcatcttggtgttaaaatatttgatacgactaaggacatagataaattagaacttattagagattatttaagaccagcattagaattatatgatattagtataaatttaccagatacttttagcccaaaagaaggtaaaaagattgaaatagcattaaaagacgactggagtatatttaatgttgaggaagctcaaataagttgtattttaaatgaactttttaaagatgatgaaaatttagatagacgagtgttggaagatttagtaggcgctaaaatcataaacgataaaaaatatacaaataaaaatctaattgtagcaaataatgactgggatggattttgtgagagcttgaagtataaaaatagatttcataataatatgatcaatttagagaatttagcgttctttctcgatatcactactaattactatagtattgaggaatttagagaaagatttgaaccattatatagatctagaatagttaagttcattacagagaaaagtgaactaatgtcaccaccaaagggatttgcaacggcaggaagattgaattctaaatggataagcgtattataccttagtacaaaagaacaggtcagtatagaagaagttaaacctaagcataatgacattatttatataggtaaggttaagttacaaaaaaacgtgacaaaagagaaattgaaaattgcgaatttaactaatttaactagtaatgcaatcaaagctggcgatgatggatttagaaagtattttgtaaattaccaaacattaaaaagattcataaaggaataacaaatccaagcgatgaacaaggaatagattatttgccatttcaatatttagctgattatattcgaagccttaaatatgacgggataatgtatgagagcatattacaagatggtacttttaactttgtgttttttgatcaaagtttatttgaatgtgttaattatgaaagaaaaagagtaagtgacgttaaatatacattgactaagctaagttgacacactcaaaaatctgaatattctaataaaatataaataatcccccgcacttcacatagtggcgggggatttattctggcgttaaaatgcccaaagtatgggggtgactcttaaatcatggcaaagcacctaaaacttgatatggtgccgagccctaacttagcacaatatagttagtatgacaaagtcatctaacataacacatcagaagtcgcgcaatttatttcagaccatacagtgataaagttgcacaacgcatgacttttatttagcaataactgctacttctgaaataagttgctttgcatagtctgactgcggatgtttgataatatcttctgtgttattcagttcaacgatttcgccatttttcataactgcaacgcgatcacatatttcattgataacacccatgtcatgtgtgatgaataaataagtgatgccgaagtctaactgtaattgttttaataactcgatgatatctttttgaattgaaacgtctaaagcggacactgcctcgtcgcaaacaatcactttaggttcaacagcaagtgctctcgcgatacttacacgctgacgttgcccaccagataattcgtgtggatagcgatataagaaagtttgatctaggccaaccttttctaacaacgatacgacagttttaataatgtcatcattatctttgactttcccatgaatgattagtggtcgtttaatcacatcaatgactttaaatcttggattaatagatgcgaatggatcttgaaaaatcatttgtatctcttgtcgtaaagatttcaattcatcatctttaaataaacttaatggtaattcgttataccaaataaagccttctgacacttcctttagaccgacgaccgtcttagctaatgtcgatttccctgaccctgattcaccgacaatgcctaatgtttcgccttttctaatagccaagttaatatcattaactgctcggtataggctgccactcggtgatgtgtaatccacgctcacgcgatcgaattttaataaaatatcattgtttaacggtcttggcggacgcgtttgatgaatatcaggaatcgcatctattaagcgttttgtataggtatgttgtggcgatttaaaaatactttcaaccgtgccactttcaacgacacttccatctttcattacaatcacatcgtcgcaaaattgatacacagcgcctaaatcgtgagtgataaaaataatagatgtttctgtgtactcataaagggacttcattaactgcagtaattgattttgtgtactggcatctaatgccgttgttggttcatctgcgattaaaatttgtggctttaaaatcaatgccattgctatcatgacacgttgacgcataccaccagaaagttcatgtggataagcatcaaattgtcgagttgcatgttttatacctactttttctaaaatgtctattgtcatcgactttgcttcagatttagatacacgtttatgttgaaatattacttctgtaatttgtttgccaatcgttaatcttggattcaacgaagagagtggatcttgaaaaatcattgaaatatccttacctcgaatttgttgtaacgctgaagttgataaattatttaacgattgcccattaaaaataatttctcctgttaatgtgtgatctggataatctggtagtagccctaaaatagatttagcggtaatactttttcctgatcctgattcaccaacaatacctaggatatgtttttttcgtaattcgaaagagacgttttttaccgcttgaactgtagtttcatcataattgaattgtacattcagactgttgacttctaataaatttgacatgatgttgtgcctccctattcacaaatgtgtaaatttattctatacttttgtatatcatagtaatctactcaagattattttacaaggagtgattatcataattacttatttagaatcttttaagtcgttgtatcacaaggcattttacaagtttgtattatcggtattaagcttgccaatatttttatatgcagtgataaagtttttcttttctgctaagaggaaaaatttttacgctaataattctgaaatttcagaaattgaacaggcgttacatcaaaaatataaatatttatcgcagcaaaagtcatccacacaaatacataaagaagcattaaaaatattcaaggcacaaagttctaatacgagttcaaagaatattgaacaagcacatttttcaacatactttgaaaatgtattatttcataagttcatcatgatcaaagtgatattggccttgccgatgttcatcttattgactttttatttacagccattagttagatatatttttgaacgaattgtcatggctgtgattgtcatcattggtgttattgtcagtgtgtttaccattctgtatttttcaccgcttgatgcggcttatagcatactgggacaaaatgcaacaaaggcacagatacatcaattcaatgtattacatcatcttaacgaaccttattttattcaattgtgggataccatcaagggtgtttttacctttgacttaggtacgacttacaaagggaatgaggttgtgactaaagcagttggcgaaagaattccaattacaataattgtcgcagtattagcgctaatggtggcattaattattgcaataccaattggtattatcagtgcgatgaagcgaaatagttggcttgatatcacgttaatgataattgcattaattggtttatctattccaagtttctggcaagggctattattcattttagcgttctcattgaaattggatattttgccaccatcttatatgccagaacatccaatatcgttgattttacctgtacttgtcattggaacaagtattgctgcttctatcacgcgtatgacaaggtcttctgtacttgaagtaatgcgcagcgattatgttttaactgcttatgcaaaaggattatcgacgacacaagttgttattaaacatattttgaaaaatgccattattccaattgtaacgttagttggtcttctagtggcagagttactaggcggttcagcagtgacggaacaagtatttaacattaatggtatcgggcgttatatcgtccaaaaacaactaatacctgatattccagcagtcatgggtggggtcgtatatatatcaattgtaatatctttagcaaacttaattattgatatattttatgctttaatcgatccaaaattacgtagtgaaatcaacgaaaggaagtgaggcatatggcacaacttaattcaaagatagcttccttaaaattattcgcaagttacgccatagcaacttatattttagttatattaacgagtgcattaaatctttttaaaggttatgtggccgatacgttctatattgctgaaacattgctaatcgttttaaccatcattttaattattattttaacaacggaacaaacatggaagcatcatgacctatggcgacgtatcgtcgaagtgttgttattgttgatgacattaacaggcaacgtatttacattattaatgtttgtaagtattagacgttaccaacgtacatcgcaaatacatagttataacgggtgggaatcgtttatacgaaaaactactagacatcgtattgcgattatcgggttacttattttagtctacatgctgacattatcaattgtgtcacaatttacatttgatacgacattggctactaaaaatcagttcaatgcactgttacatggaccgagtctagcctatccgtttggtactgatgatttcggtagagacttatttacacgcgtagttgtaggaacgaagctgacattttcaatttcaattatttcagtagttattgcagttatttttggtgtgttactaggcactatcgcaggttattttaatcatattgataatttaataatgcgaattttagatgtagtgtttgcaattccatcattattgttagcggtggcaattattgcatcatttggagcaagtattccaaatttaattattgctttaagtatcggtaatataccatcatttgcacggacaatgcgtgccagtgttttagaaattaaacgcatggaatatgtagatgcagcacgtatcactggtgaaaacacttggaatatcatatggcgttatattttaccgaatgcgattgcgcctatgattgtacgtttttcattaaatataggtgtggttgtattaacaacaagtagtttaagtttcctaggacttggtgttgcacctgatgtagctgaatggggcaacattttacgtaccggtagtaactacttggaaacgcacagtaatttagctattgtacctggtgtttgtattatgttcgtcgttttagcatttaattttataggtgatgcagtgcgtgatgcactagatccaagaattcattaaaaaggtagggatagatgtgaagaaaatcattagtatcgcaattatagttttagcgttggtattaagtggttgtggtgtccctacgaaatcagaagtggctcaaaagtcatcgaaagttgaagtgaaaggcgagcgaccaacaatacatttcctaggacaagcaagttatgaaaatgatatgaatatcgttaaagatcaattggaaaatgcaggatttaacgtgaagatgaatatccaaccagattatggtagctatcgtacacaacgtcaagccggcaattatgatatccaaattgatgactggatgacagtgtttggtgacccgaactatgctatgacggcattatttagttctacaggatcaaatagtttattgaaagataaacatgtagaccagttgttaaataaagcttctactcaaaatgaagcagatgttaaacaaacatataagcaaattgaagatgaagttgtatttgataaagggtatatggcgcctttatatggatcaaaaaagaatttagtatatgacaataaagtgttagataaaaatagtgttggattgccaaattcacgtgcattaatatggcaacaatttgattacaacaatagtagagaacgagatacgcggccacttgtgatgacacaacaagatggtgaaattcctacattggatccaatacgttcaattgcgccgtcagtatattcaattaatatgaatatgtacacaaggttattattattagatgaaaatgatcatttaacaacgaaaggttcgttaagtcatgattatgctgtgaataaggacaataaagcattttatttcttgttaagagatgatgattattttgcgaaagtggtcaatggacaagcacgtaatactggagagcgtgtatcggctgaagatgttaagttttctttagatagagcacgtgataaaaagtctgtgcctaacaataatacttacaatatgcacaaacatataaatgacatcaagatattaaaagatgaggacatcgatcagttgcgtaaagagaaagacaaggacgataaatcaatctatgataagttgattaaagcttataacgtcaaatcgttaacgacagatggtcaaaaagtaaataataaagacggtatttatcaaattgttaaaattacgacagatcaatcgatgcctcgagaggtaaattacttaacacactcttcggcaggcattttatctaaaaaatttgttaatcaagtaaatcaagaatatccaaaaggatatggggatagcagtacaattcctgcaaattcagatgggaaaaatgcgctgtatgcaagtggcgcatacattatgacacagaaaaatgcatatcaagcaacgtttcaacgtaatccaggattcaacgaaacagaaaaaggtagttatggaccagctaaaattaaaaatattacattgaagtttaatggtgacccgaataatgcattgtcagaacttagaaatcattcaattgatatgttggcagatgtgaatcaaaaacattttgatttaattaagtcggataaaaatttaagcattattcgcaaaaatggacgcaagtcagtctttttaatgctaaatattaaaaaaggtatatttaagacgcatccaaacttgagacaagcagtagttaatgcgatagatcaggatcaatttattaagttttatcgtggcgataaatttaaaattgcatcaccgattacaccacttgtcgatactggtaacgagcaacgtcaagatttagaaaaagtagaaaaagccattaatcaataatgttttaaatatttaacagaaagtaggaggatatagtatggtcattaacttaaatgacaaacagacaaaaacatctaaagaagggttaatttccgtatcacatcctcttgcggctaaaattggtaaggatgtattagatcaaggtggcaacgccatggatgcagtgattgcaattcaactggcattgaatgtgttagaaccatttgcatcaggtattggtggtggcgggtatttgctatattatgagcaaagtactggcagtataactgcgtttgatgcacgtgagacagcacctgaacatgtagacaaacaattttatctagatgattcaggcgaatataaatcattttttgatatgactacacatggtaaaactgtcgctgtgccagcaattccaaagctgtttgattatattcacaagcgttatgctaaattgtcattggaagatttaattaatcctgcaattgaactagccattgaaggtcatgcagccaattgggctactgaaaaatattcgcgccagcaacacgcacgattgacaaagtatcatgaaacggcacaagtatttacgcatgaaaatcaatattggcgtgaaggtgattggattgtacaacccgaattaggtaagacatttcaaatattaagagaacaagggtttaatgcattttataaaggtgacattgcgaaacaattagtcaatgttgtcaaagcatgtggtgggacaatcactttagaggatctagccaaatatgacattcagattaaagcgccaatcagtgcaacatttaaagactatgacatttattcaatgggaccatctagttctggcggtatcacggtaattcaaatattgaagttattagaacatgtcgatttaccatctatgggtccaagatctgttgattacttgcatcatttgatacaagcgatgcatttagcatatagtgatcgtgcgcaatacttggcggatgataattttcatgaggtgcctgtacagtcattaattgatgatgattatttaaaagcacgcagtacgctcattgatagcaataaagcaaatattgatatagagcatggtgttgtgtctgattgcattagtcatacagatgttgaagaaaatcataccgaaacaactcatttttgtgtgattgataaggaaggtaatattgcttcatttacgacatcaattggtatgatttatggttcaggtatcacgattccaggctacggtgtgttattgaatacgacaatggatggctttgatgtagtagatggtggtattaacgaaattgcaccatataaacgaccactaagtaacatggctccaacgattgtgatgtatcacgggaagccaatattaacagtaggtgcacctggtgccataagtatcattgctagtgttgcgcaaacattaatcaatgtattagtgtttggcatggatattcagcaggctatagatgaacctagaatttatagtagccatcctaatcgcattgaatgggagcctcaattttcacaatctacaatattagcattgattgcacatggacatgcaatggaacataaaccagatgcttatattggagatgtacatggactacaggttgacccaacaacgtatgaagcttcgggtggaagtgatgatactagagaaggcaccgtaatgggtggcgaggtgttagtgattagaaaacagccattaccatatcggcaaatgtatgatagtgacggctttcgtctatatttcaatgatgtgcagttacctttattggcagatcaagtgcgatggatgcatgacaaatattgggttgatgaaagtgttgttagaatcattttccctgaagttagtgcacatattgaagatttaagaagttatgaaaacgcaggagaaaattatatagatattgcctggttagcacggaaatatgcttatcaagtaacattgaaggatgacggtttatacttaactgatgatacatatacttcagtgaaacggaacacaaatgcatactatagatatgatcgagatagtatcacaagatagtttatacgcttgatatgaagtttgtagtggatatgagcttttgttgaatgaaaggattcgatttcgaactttagcgtgacgcttgagtgtagtaatgttggaaatgctatacgaaacgctagtcacctttgtaaaatatacaacgcctcacaaattcgtttttgatgtacatcacaatagttagcctaaaatctaatgtaatgtggtttggtacagttgaacgagttatgtgaggtgtttttataatataggattttaatagatgatttggatgtttctataattacagcataagtattaatgttcacttattttattataagtaaggctttctttataaatgatttggtcttttccaggacttgaaaaataaaaataaagtttctgatcttgatgattattgccttttaaatcactcattccctttaattccacctttgttgatgcgtttttaggaatattatatctacgttttaattgtttaacgtttggattatcgttcgacaacttaccagataaattataataatcagtggtaggatcatgtgtgactttcaaatcattgctatttaaaatgcttgttaaatcaccactttgaatcaaaaattgattgttttcgattttttgtttcagcgcgggatcttttacgtcttttgtgaaaacgattttattattaactacttttactggataacttttgtatgtcgagtcagtagcattttttttatcgtttgtagttgtgtcatattcaccagttattttatgtgtgttcttatctacctttaacaacatacggtcttcttttaaaagctcatctgatccaacaactgaataagaggattctatataccatgtgtcttgatcattattttcataatggggattatcgtgaccatcaatttcataaagcgtttctaagtttttaataggatacgtacttagtacttttttaagaccatctttcaaatgaatttgttcccacttcattgccaaaaacatatcgccactgactacaattgaaataataataattgctgctaagtttaaccagaaaattttatgtgctttcatacattcccaccgtttctcaaaatacttcattaacactataataatatattttgaaaaatatttacatcagtattaaagtgaacatcaaattttaaatttatgaaaataatagatatttataaaaagcggaaaagagatacaataaaaaactgcatgacgtttgagacgtcacacagtgtaactaaaaatttaaaaagttgttgctaatttttcagcattattaatactagttgctttaatttcttcagtcttatgaggttcagcattgtgtccttcaataatgattgtttcatatgatggcacacctaagaatgtcataattgttcttaaataacggtcacccatttcaaaatcagcagcaggtccttcagtataatatccaccacgtgattgaatgtgtaatacttttttgtcagttagtaaaccttgtggtccttcagcagaatatttaaaagttttacctgcaattgaaatagcatcaatatatgctttaactacaggtgggaaagaaaggttccacataggcgttacaaatacatatttatctgcacttaaaaattcttctaaaatgtcactcaatcttgaaactttcatttgttcatcatcagttaacgtttcgccattactcatttttccccaaccagttaatacatctttgtcaataactggaatataagtttcaaataaatcaatatgtttcacttcatcatcaggatgttgttgttgatatgtttcgataaatgctttaccagccgccatagaatttgataccagttcattaaaagggtgtgctgtaatatataatacttttgccatttgaaaattctcctctgtttctgttattttcttaagtataattattatactcgatataaaatttaatatcaatcaaaatattcaaattaccatcattttcttcatctatatttggcagtactactaaagtatgagtgcatttaattatgaaatagttgatttagaatatatacttaatacccaaaatatatgaaggatggatgccactatgacaaagcgaccaaaacgtattttggcaacaattatcatttttctttcactattatttacgattatttatatagatgacattcaaaaatggtttaaccaatataccgataaattgacacaaaatcataaaggacaaggacactcaaaatgggaagacttttttagagggagtcggattactgagacttttggtaaatatcaacattcaccatttgatggtaagcattatggcattgattttgcattgccaaaaggtacaccaattaaagcgccgacgaatggtaaagtaacacgtatctttaataatgaattgggcggcaaggtattacagattgccgaagacaatggagaatatcaccagtggtatctacacttagacaaatataatgtcaaagtaggtgatcgagtcaaagcaggtgatattattgcatattcaggcaatacaggtatacaaacgacaggcgcacatttacattttcaaagaatgaagggtggcgtaggtaatgcatatgcagaagatccaaaaccgtttatcgatcagttacctgatggggaacgtagcctatatgatttgtagttatagaagggtgcccgcagtctaaaaaattaagcaatcattgtgtgagtatgatacttacataatggttgcttttttcaatgaaaatcgtaatgctaagtcatacttgtttgatttagatattacttaaaatgtaagacaaggttgttagcattggcagtgaaatatcgcacataaaaaacattattgtcacactagaaaatagttgtgcactatatcaattttctgtataaaagtttaattctgacagtaatgtaaacgtttataatttatgattgacattaataatgactgaatatatgatttatgtaagtatttgtgcaaacgttttcacaaagtgtattgcacaatcaaactgtaaacaaagtatgggaggcataacatggcagaactaaagttagagcatattaaaaagacgtatgataacaacaatactgtagtgaaagattttaatctacatattactgacaaagaattcattgtatttgttggaccatcgggatgtggtaaatcaacaacattacgaatggttgctggactagagtctatcacatctggagatttttatattgatggggaacgcatgaacgatgttgaaccaaagaatagagatattgcgatggtatttcaaaactatgcattatatccacatatgactgtttttgaaaatatggcatttgggctaaagctacgtaaagtaaataaaaaagagattgaacaaaaagttaatgaagcagctgaaatattaggattaactgagtatcttggtcgtaaaccaaaagcgttatctggcggacagcgtcaacgtgttgctttgggcagagctattgttagggatgcgaaagtctttttaatggatgaaccattatcgaatcttgatgcgaagcttcgagtacaaatgcgcacagaaatattgaaattacataagcgacttaatactacgacaatttatgttacacatgatcaaactgaagcattgacgatggctagtcgaattgttgttttgaaagatggcgacattatgcaagtcggcacacctagagaaatatatgatgcccctaattgcatatttgtggcgcaatttatcggctcaccagcaatgaatatgttgaatgctacagttgaaatggacggattgaaggtaggaacacaccattttaaattacataataaaaaatttgaaaagttaaaagctgctggctacttagacaaggaaattattttaggtattcgagctgaagacattcatgaagaaccaatatttattcaaacttctccagagacacaatttgaatctgaagtagttgtatccgaactgttaggttcagaaattatggtacatagcacattccaaggaatggaattgatttctaaattagattcaagaactcaagtgatggcgaacgacaagattacactagcatttgatatgaataagtgtcacttttttgatgaaaaaacaggaaatcgtatcgtctaagggggagtattcatgtctaaaattttaaaatgtatcacgttagccgtggtaatgttattaatcgtaactgcatgtggccctaatcgttcgaaagaagatattgataaagcattgaataaagataattctaaagacaagcctaaccaacttacgatgtgggtggatggcgacaagcaaatggcgttttataaaaaaattacggatcaatatactaaaaaaactggcatcaaagtaaagcttgtaaatattggtcaaaatgatcaactagaaaatatttcgctagacgctcctgcaggaaaaggtccagatatctttttcttagcacatgataatactggaagtgcctatctacaaggcttagctgctgaaatcaaattatcaaaagatgagttgaaaggtttcaataagcaagcacttaaagcgatgaattatgacaataagcaactagcattgccagctatcgttgaaacaaccgcacttttttataataaaaaattagtgaaaaatgcaccgcaaacgttagaagaagttgaagctaatgctgccaaactaactgatagtaaaaagaaacaatacggtatgttatttgatgctaaaaatttctattttaattatccgtttttattcggcaatgatgattatattttcaagaaaaatggcagtgaatatgatattcatcagctaggactaaattcaaaacatgtcgtcaagaatgctgaacgattacaaaaatggtacgacaaagggtatcttcctaaggcagcaacacatgatgtcatgattggtctttttaaagaaggaaaagtaggacaatttgtcactggaccgtggaacattaatgaatatcaagaaacgtttggtaaagatttaggagtaacaacattacctacagatggtggcaaacctatgaaaccatttctaggtgtacgtggttggtatttatctgaatatagtaaacataagtattgggctaaagatttaatgctgtatatcactagtaaagatacattacaaaaatatacagatgaaatgagcgaaattactggacgtgttgacgtgaaatcatctaatccaaatttaaaagtgtttgaaaagcaagcacgtcatgctgaaccgatgcctaatattcctgaaatgcgacaagtttgggaaccgatgggcaatgcaagcatatttatttcaaatggtaagaatcctaaacaagcgttagatgaggcgacgaatgatataacgcaaaatattaagattcttcatccatcacaaaatgataagaaaggagattagttatgacgaaacgtaaccctaaattagcggcattattatctgttatacctggtttgggacagttttataataaaagacccattaaagggacgatattttttatctttttcatcagttttatttctgttttttatagctttttaaatattggtttttggggattgttcacattagggacagtacctaagttagacgattctcgtgtcttacttgcacaaggtattatttctatcttactcgttgctttcgcaatcatgctatatatcattaatattttagatgcatatcgtaatgctgaacgatttaatcgcaatgaggaaataaaggatccgaaggcgcgtatggtggcaacatgggacaagacgttcccatacttactaatctcaccaggtacattcttattgatatttgtagttgtatttccattaatatttatgtttggagtagcatttacaaattacaatttatacaacgcgcctccgagacacacattagaatgggttggtttagataactttaaaacgttattcacaattggcgtttggcgtaaaacatttttcagtgttattacttggacattagtatggacgcttgttgcaacgacacttcaaattgcattagggctgtttttggcaattattgtaaatcaccctgtcgtcaaaggtaagaaatttatccgtactgtgttaatcctaccttgggctgtaccatcatttgtgacaattttaatatttgtagcgttatttaatgatgaatttggtgcgataaataatgatattttgcaacctttattaggtgtagcaccagcatggttaagtgatccgttttgggcaaaagtggcattaatcggcattcaagtatggcttggattcccatttgtctttgcactgttcactggagtactgcaaagtatttcatcagattggtacgaagcagcagatatggatggtgcgtctagttggcaaaagtttagaaacatcacattcccgcatgtcatttacgccacagcgccattgttaattatgcaatatgcaggtaatttcaataattttaatcttatttatctatttaataaaggcggtccaccagtgtcagggcagaatgctggtagtacagatatcttgatatcttgggtgtataatctgacatttgagtttaacaacttcaacatgggtgcagttgtgtcattaattattggatttattgttgctattgtcgcatttattcaattcagacgtacaagtacgtttaaagatgagggaggtttataagatgacaaagaagaaaaacatattaaaagcaatcggtatttacagttttatagcgatgatgtttgtcatcattttatatccactactgtggacatttggcatttcccttaatccaggtacgaacttgtatggtgccaaaatgataccagacaatgcaacatttaaaaattatgcattcttactattcgatgacagtagtcaatacctgacttggtataaaaatacgcttatcgtagcatctgcaaatgcactgtttagtgtgatatttgtcacgttaacagcatatgctttttctagatatcgctttgttggtcgtaaatacgggctgattacatttttgattttacaaatgttccctgtattaatggcaatggtcgcaatctatattttgctaaatacaattggattattagattctttatttggactaacactggtatatattggtggatcaataccgatgaatgcctttttagtgaaaggttacttcgatacgattccaaaagaacttgatgaatctgccaaaattgatggtgcagggcatatgcgtattttcttacaaattatgcttccattagctaagccgattttagcagttgttgctttgttcaattttatggggccatttatggactttatattacctaaaatactattaagaagtcctgaaaaattcacattagcagttggattgttcaactttattaatgataagtatgcaaataatttcacagtgtttgcagcaggggcaattatgattgcagtacctatagcaatcgtattcttgttcttgcaacgctatttagtatcaggtttaacaacaggtgcgacaaaaggttagtttgaaattaggagtggggcagaattgataaagaaccactaatgacgataaagattaaaaggaggacgttatgatgacgattaaagttggaatcattgggtgtggtggtattgcgaatggcaagcacatgccaagtttacaaaaagttgaaaatgttgaaatgatcgcattttgtgacgtagacatttcgaaagcagcgagtgcggcagaagcatacggaactgacaatgcaaaggtttatgatgattacaaagcattgttaaaagatgacacgattgatgttatccatgtttgtacgccaaatgactcgcattgtgaaattactgtagcagggttgcatgctggtaaacatgtgatgtgtgaaaaaccaatggctaaaacgacagcagaagctcaaaaaatgatagatacagctaaatcaacaggtaaaaaattaacaataggttatcaaaatcgtttccgagcagatagtcaatttttacatcaagcagcgcaacgtggcgacttaggagacatttacttcggaaaggcacatgccattcgtcgtcgagcagtaccaacatggggtgtctttctagacgaagaagctcaaggtggaggaccattaatcgatatcggtacacacgctttagatttaacgttatggatgatggataattatgaaccagaatcagtgatgggttcaacattccataaattaaataaacagcatcatgcggcaaacgcttggggttcatggaatccagatgaatttacagttgaagattctgcgtttggatttattaaaatgaagaatggagcgacgatcattttagaatccgcttgggcgattaattctttagaagtggatgaggcaaaatgttcattatcaggaactaaagcaggtgctgatatgaaagatggtctacgtattcatggtgaagacatgggtacactttataccaaacacgttgaattggaaaacaaaggcgtcgacttttatgaaggtaatgaagtggatgaagctgaagaagaagcaaaagcttggattgatgcagttgtaaatgatactgaaccagttgtgaaaccggaacaagcaatggtagttacaaaaattcttgaagcgatttatcagtctgcaaaatcaggcaaagcaatttactttgaataacatcatacggtaaggaggcacatcatgacaaaattaaaagttggtgtgataggtgttggtggtattgcacaagaccgtcatattccagcattgctgaaactcaaagacacagtctcattagttgcagtacaagatattaatacagtgcagatgattgatgttgcgaagcgctttaatatacctcatgcagttgagacacctagcgagctgtttaaacttgttgatgcggtggtcatttgtacacctaataaattccatgctgatctttctatagaagcattgaaccatggtgtccatgtattgtgtgaaaagccaatggcgatgacgacggaagagtgtgatcgcatgattgaagcggctaataaaaatcacaaattattaactgtcgcatatcattatcgtcacacagatgtggcaattactgctaaaaaagcaattgaatcaggtgtggttggtaaacctttagtagcacgtgtacaagcgatgcgtaggcgtaaagtgcctggctggggtgtttttaccaataaagcgttgcaaggtggcggtagtttaatcgattatggttgccacttgttagacttatctttgtggctactaggtaaagatatggtgccgcatgaagtgctaggaaaaacatataatcaattgagcaaacaaccgaatcaaattaatgattggggaacatttgatcatactaaatttgatgtcgatgatcatgttactagttatatgacatttgccaatcgagcaagcatgcagtttgaatgttcgtggtctgcaaatatcaaagaagataaggttcacgttagtttatcaggagaagatggcggtatcaatttatttccatttgaaatatatgagccccgctttggaactatttttgaaagcaaagctaatgttgagcataacgaagacattgctggtgagagacaggcgcgtaactttgtcaatgcgtgtttagggatagaagagattgtggtgaaaccggaagaagcacgcaatgtaaatgcccttatagaagcgatttatcgtagcgatcttgataacaagagcatacaactttaatgattatcatatatgatacaaaattctcaatataaaaagaaggagtgcttttcaatgaaaataggtgtattttcagtattattttacgataaaaattttgaagatatgttagattatgtctcagaatctggattggatatgattgaagttggaacaggtggtaacccaggagataaattttgtaagttagatgagttgttagaaaatgaagacaagcgccaagcatttatgaagtcaatcacagacagaggcttacaaataagtggtttcagttgtcataacaatccaatttctccagatccgatagaagcgaaagaagccgatgaaacgttacgtaaaacaatccgtttagcaaatctattagacgtgccagttgttaatacattttctggcattgcaggatcagatgataccgctaaaaagcctaattggcctgttacaccttggccaacagcctactctgaaatttatgattatcagtggaatgaaaagttgataccatattggcaagatttagctgagtttgcaaaagagcaagatgtaaaaattgccatagagttgcatgcaggatttttagtgcatacaccatatacaatgttgaagttacgtgaggctacaaatgaatatatcggtgctaacttagatcctagtcatctatggtggcaaggtattgacccaattgctgcgattcgcatattaggccaagcaaatgcaattcatcacttccatgctaaagatacgtatattaatcaagaaaatgtaaatatgtatggtctaactgatatgcaaccatatggtaacgttgcgacaagagcatggacattccgtacagttggttatggacatagtccatatgtatgggcagatatcataagtcaacttattattaatggatatgattatgtattaagtattgaacatgaagatcctattatgtcagtagaagaaggtttccaaaaagcttgtcaaactttgaaatctgttaatatttacgacaagccagcagacatgtggtgggcataatacgaactcgaggttagtctgaagtttgtctgaagtaagactggtggcagtgttgaataaatgcatatgtcgccaagccattgccaaaaatttcacaccttaaatcaagtcattgtttgtaaagaaggtgtactttatataagtatatagcgatggtcatacccattcacagtaacaatcctcaccattgaaaagagtatataaccttttcaatagtgaggtatatgataataaaaaaagcctgttgtcacaatggtcatagacacgacatactttaaaggtttctgaatataatatttcagaatgcactttaaagatggacgtcgatgtagactaaagtgatgacaggctttcatctttttaaatattcattaatttctcttcttgtttaatacgtacatataagaaatacgcatacggtactaataaaatagttgtatatgttgcgtgtgttaataataatacaccgattaattcaggaatgatgtttaagaagtaatttgggtgttttgtaattttatataatccagatttaataataggatggttaggtaaaatgaataattttaatgtccaaataccacctaaagttttaataaccataaataacatgatataagcaaagattaatataactaagccaataccatttgcaaagctaaatgtatctttattaataaatgcctctacaccagccaatacataaattaaaacgtgtgttattgctaaaaacttcgaatttttaacgccatattcaactgcaccgtctgcttttaattgttttgagtgattaatagatatctttaagctgacaagtctgatacagaaaaagataagtaatatagatagaatcatgatgtcctccgtcattatgtcatatgtataagcgttgattttgacaacataaagtattttatagataaagcttgtcaaatactattaactatttattaattttagtacataaatatgtttctaagtatgtgtttatgttcagtattttggataatttaataattttaaggatattaagcgcttacaccgacgtgatatatttggcttaacgaaaatgattgaggtgacagagatgaacttttttgatatccataagattccgaacaaaggcattccattatcggtacaacgtaaattatggcttagaaacttcatgcaagctttcttcgtagtgttctttgtttatatggctatgtatttaattcgaaacaactttaaggcggcacaaccgtttttaaaagaggaaattggattatctacattagaacttggttatatcggattagcatttagtatcacgtacggtttaggaaaaacattacttggatattttgtcgatggacgtaacacaaaacgtattatctcgttcttacttatcttatctgcgattacagttttaattatgggatttgttttaagttactttggttctgtaatgggattattaattgtactttggggacttaacggggtgttccaatcagttggtggacctgcaagttattcaacgatttcaagatgggcgccaagaacgaaacgtggccgatacttaggattctggaatacatcacataatatcggtggtgccatagcaggtggtgttgcactttggggtgctaatgtattcttccatggaaatgttatagggatgttcattttcccatcggtgattgcattacttattggtatcgcaacattatttatcggaaaagatgatccggaagaattaggatggaatcgtgctgaagaaatttgggaagagccggtcgataaagaaaatattgattctcaaggtatgacgaaatgggagatctttaaaaaatatatcctgggaaatcctgttatatggattctatgtgtttcaaacgtctttgtatacattgtacgaatcggtattgataactgggcaccgttatatgtgtcagagcatttacactttagtaaaggcgatgcagttaatacgatattctactttgaaattggtgcattagttgcaagtttattatggggctacgtatcagacttattaaaaggtcgtcgtgcaattgtagctattggctgtatgtttatgattacatttgttgtcttattctacacaaatgctacaagtgtcatgatggttaacatttcattgtttgcattaggtgcgttaatctttggtccgcaattattaattggtgtatcattgactggttttgttcctaaaaatgccatcagtgtagcaaacggaatgacaggttcattcgcgtatctattcggtgactcaatggcgaaagttggtttggcggctattgctgatccaacacgtaacggtttaaacatctttggatatacattaagtggatggacagatgttttcatcgtcttctatgttacattattcctaggcatgattctattaggaatcgttgctttctatgaagaaaagaaaattagaagtttaaaaatttaatataaatcggattaaaagtatcgccaatctattgcaatatagttggcaatcctgccccgacggcatgtgcgtgaagagatgaaagatactgcttctacccttgcaaatatatcatctctatgtctcggggcagatcataattccctgttatgaagtatccttatttgcccgacttagggtgactcaatgaatttactccttacaataaagacatatagcggtgtcaatattgtagggagtattgttttatatttaaactctctaaaaagcggactgaaagaaaagtgaaaacttctctatcagtccgctttttcatagaacaaaatggaggcgccataatcattagttatgtgctaatctattttgcttgcttacaataatcacttggcgacatttgtaaatattttttaaaatgatagctaaacattttatactctgaaaagcctactttgtctgcaatttcatagtgtttgtaatgtcgatctaacaattgcagagattgtaaaatacgatagcgatttaaataatcgacaattgtaataccaacatgatctttaaatgttcgcatcgcatacgattcactaacatcgatatgttgaattaaatctgaaacagtcactttcgtttgataagattgcttaatttgatccacaatctggtttacataataatcatcgtattctacttttaatagtggttggaaggcatcatgacaagatgctaagctacggccgttctgtgattgttgctctaataaggtacggacaagtcttcctaaaataacttctaattgtgcatggtctactggttttaataaataatcaagaacatgatgttgaatgccggctttcatatattcaaagtcatcgtaactcgataatatgatgacattacaatctagatgcgcaatatcattgagtaaatcgacgccatttttacgtggcatacgaatatcagtaattactaattctggctgatgttgttgaattagtgataatgcttcaacaccatctttagcagtgtatattgtattgaaatgatagtctccccaaggaatgatttgctttaatccttctcgaataattcgttcatcatcacaaataactaccttaaacatctacattcccccttgaaagtggtattttataacaaattaacgtaccttgattacgctttgaaaaaatatggagtcgtgcatgtgaaccatattgaatcattgctttattgtgtaaatgatttaatcccaaatgcttagtatcaaatacatcattattaagagattggcgtacatattgcaggcgagatgacgacatcccgataccattgtcgcaaactaaaacatgtaaattctgacgtgccaatgtcaggcgtatagtaatgtccaatgactcagtatctctaccatgtttaatagcattttctatgagtggctgaagcatcattttaccaattgtctggtgacgcgcttcttcagaactttcaatatggagcttaatcatgtcatcaaaacggatgttttgtattgcaacatactgttcaatgtagttcaactcttcgtttaattccactgtatgtgagtttgtacgtaatgagtaacgtaacatttgcgataattgttggaccacagtttgtgctaatttcggagataacgtaattaaatattgtattgtttgcatcgtattgaataggaaatgaggctggaattggcgttctatttcctttaactgaatatcacgcaagcgacgttctgtatgctcgatagaatggatcagttgctcatttgattcaaataaatcgtaaatataattattaatttcttctagttcactgttgttttttaaaggcgtatatgtacctagatgacgatttttggcatagtaaattttttgaataatcgtttcgatatcttttgtttgtcgtttagccatattatctgcgctaatgaaaccaaatattactagtaaaacaagaactacggccataacaattaacaacgtgataccatcttcaatgttttcatgtatatctttataaataatgagacgatggtcagcatggtttaattttacagattcattcataaatccgaattgttgtggtctatacttttcacctatagtaaaacggtcatcgttggcgtataaaatattgtcatattgatcaacgataagtgcgaattgtcggttatctttcttaatttcacttaaacgtggggtgttagccatataaattttaagcatatatgtactatttttgaatttaagctgatgcgttgaaaataaatacatatttttagtgtttaaatgttcataattattggttataaactgatttggtccagataattcataataaagtgttgcgggctgttggtgtattaattttaataattcacgttttgtagcggtcacatcatgatgatttgttaaatcgagctcttgaaacgaattattatgctgtgtaataaatgtctgaatctgcttttcagtatgatgtaaagatgactgactttcatcaacatgttgatgaatcgtacgatgctcaatccaaatatagatggcatagaagcttactagtccaataataatgactaaaaatactggaaaaatagtagacgcaaataacgatcgtcttaattgatgtctataaggtttgtatgccgtcattgaatcatctccaaaaatttatgatgtggaatatccggtaatttagatttcggtattaaaggtatgttcttaagattttcgatagactgatcgctttgttcactaacatcctttcgaattgacttggcatcgaactctgcaactaatcgttgttgtactgagcggcttgttaaatattgcactaactttttacgcttaggatgagggtgtgcatttttaactaaagcaataccatcaacatttaacattgttccttcaattggataaacgattgatacaggataacctttgtttttccatgtgcgtgcatcttgttcgtagcttagacctgcgtaatatttaccttttgcaacatcttcaatgactttagacgtctttgacagttgcatcgcatggttttggaattgatgcacatcacttactcgatgatgcatgctataaatagcacgcatatgttgatagcctgtcgttgttgtatttggatttgagtacgcaattttacctttaagtataggttgtaataaatcttgataacctcgaatcttaatatctccttgtaaatctgaattcactactataactgttggcattaatagaaaactagtaacatatttattgttcgagcgataatcctctaattgctgtgttacagatgtatcttgatagggaacaaaatcttctggatgatcaattgtttctgacaacacaccacccataaagacatcaccacgctccgaaaaatcttcgttatgcaagtttgaaagcagtacttgagtagatccgtgtttaatttcaattttgacatgctcttgtttttcaaattcatttaaaattggacgaatcaagtttgattgatacggagaataaactgttaatacatttttatcggattcagagtgacgcgtattagcgcatgctgataaaaaaatgagaaataatagcaagatataaatttttgatttcatgatatcccatcaattctatgtatattttaatacaataattttagcaataaatgacgcataagtaatgttaaatatttagaaatgtttatagatgacttgttaagacgttgcaaatgttgtgatagcacaaaatttttgtttgtcaagacgatttaccgaggctgtaaaatcaaactgttatattttatttgtagctgttatataaaaatcggcaagatattgaacggttcaaaagtgaatttttacgtcaataaaagtatttaatccagtctcttcatatataaaagtaaatctttctaagtgttgatttaacgcttatcaacaatcattttttataaacaaatatatactcctaaattaacttttaaagcaatgaaaatagtgaacattataactgttgtgtaacagaatgcaattagcatattactgttacacaaattagtacagtttctatgttttgacatacatttgatgaaaattgtacataatttatgtgaaaaaaatcacaacaaacatgctacaatgactatgaaaacgttaacatagcatttcaaattcacaacattatacagatggaggcgtttagtatgttagaaacaaataaaaatcatgcaacagcttggcaaggatttaaaaatggaagatggaacagacacgtagatgtaagagagtttatccaattaaactacactctttatgaaggtaatgattcatttttagcaggaccaacagaagcaacttctaaactttgggaacaagtaatgcagttatcgaaagaagaacgtgaacgtggcggcatgtgggatatggacacgaaagtagcttcaacaatcacatctcatgatgctggttatttagacaaagatttagaaacaattgtaggtgtacaaactgaaaagccattcaaacgttcaatgcaaccattcggtggtattcgtatggcgaaagcagcttgtgaagcttacggttacgaattagacgaagaaactgaaaaaatctttacagattatcgtaaaacacataaccaaggtgtattcgatgcatattctagagaaatgttgaactgccgtaaagcaggtgtaatcactggtttacctgatgcatacggacgtggacgtattatcggtgactatcgtcgtgtagctttatatggtgtagatttcttaatggaagaaaaaatgcacgacttcaacacgatgtctacagaaatgtcagaagatgtaattcgtttacgtgaagaattatcagaacaatatcgtgcattaaaagaattaaaagaacttggacaaaaatatggtttcgatttaagccgtccagcagaaaacttcaaagaagcagttcaatggttatacttagcataccttgctgcaattaaagaacaaaacggtgcagcaatgagtttaggtcgtacatcaacattcttagatatctatgctgaacgtgaccttaaagcaggcgttattactgaaagcgaagttcaagaaattattgaccacttcatcatgaaattacgtattgttaaatttgctcgtacacctgattacaatgaattattctctggagacccaacttgggtaactgaatctatcggtggtgtaggtattgacggacgtccacttgttacgaaaaactcattccgtttcttacactcattagataacttaggtccagctccagaaccaaacttaacagtattatggtcagtacgtttacctgacaacttcaaaacatactgtgcaaaaatgagtattaaaacaagttctatccaatatgaaaatgatgacattatgcgtgaaagctatggcgatgactatggtatcgcatgttgtgtatcagcgatgacaattggtaaacaaatgcaattcttcggtgcacgtgcgaacttagctaaaacattactttacgctatcaatggtggtaaagatgaaaaatctggtgcacaagttggtccaaacttcgaaggtattaacagcgaagtattagaatatgacgaagtattcaagaaatttgatcaaatgatggattggctagcaggtgtttacattaactcattaaatgttattcactacatgcacgataaatacagctatgaacgtattgaaatggcattacatgatacagaaattgtacgtacaatggcaacaggtatcgctggtttatcagtagcagctgactcattatctgcaattaaatatgcacaagttaaaccaattcgtaacgaagaaggtcttgtagtagactttgaaatcgaaggcgacttccctaaatacggtaacaatgacgaccgtgtagatgatattgcagttgatttagtagaacgcttcatgactaaattacgtagtcataaaacatatcgtgattcagaacatacaatgagtgtattaacaattacttcaaacgttgtatacggtaagaaaactggtaacacaccagacggacgtaaagctggcgaaccatttgctccaggtgcaaacccaatgcatggccgtgaccaaaaaggtgcattatcttcattaagttctgtagctaagatcccttacgattgctgtaaagatggtatttcaaatacattcagtatcgtaccaaaatcattaggtaaagaaccagaagatcaaaaccgtaacttaactagtatgttagatggttacgcaatgcaatgtggtcaccacttaaatattaacgtatttaaccgtgaaacattaatagatgcaatggaacatccagaagaatatccacagttaacaatccgtgtatctggttacgctgttaacttcattaaattaacacgtgaacaacaattagatgtaatttctcgtacattccatgaaagtatgtaacaaaatttaaggtgggagcactatgcttaagggacacttacattctgtcgaaagtttaggtactgtcgatggaccgggattaagatatatattatttacacaaggatgcttacttagatgcttgtattgccacaatccagatacttggaaaattagtgagccatcaagagaagtcacagttgatgaaatggtgaatgaaatattaccatacaaaccatactttgatgcatcgggtggcggtgtaacagtcagtggtggcgaaccattgttacaaatgccattcttagaaaaattatttgcagaattaaaagaaaatggtgtgcacacttgcttagacacatcggctggatgtgctaatgatacaaaagcatttcaaaggcattttgaagaattacaaaaacatacagacttgatattattagatataaaacatattgataatgacaaacatattagattgacaggaaagcctaatacacacatccttaacttcgcgcgcaaactgtcagatatgaaacaacctgtatggattcgacatgtccttgtgcctggttattctgatgataaagacgatttaattaaactaggggaatttattaattctcttgataacgtcgaaaagtttgaaattctgccatatcatcagttaggtgttcataagtggaaaacattgggcattgcatatgaattagaagatgtcgaagcgcccgatgatgaagctgttaaagcagcctaccgttatgttaacttcaaagggaaaattcccgttgaattataaatacaattcagaccgaaaagaaagcatatgcaacttcaagagtgaaggggcatatgcttctttttcaattgagtattgagtattagcaagacgtagtaagtatatgagacaacttctacaatggttgaaggaagacgtttttgtaagtagctatgctgataaagaatgtgatgtcttgttaaaggtggggttccaatatcatcatttagctgatgttgaatgggttattatttgctacttgcatatgaatatgagtcttttcaaatttttattgaccctgagtaatgaaaaatattaagatgaaacttaatattaaagcaatgcggagcgtgattatgaagagaattagtaaagatatatgggcagtatttaaattactgtatcaaaataaagggcgttttagcattaatgccttactattgcagttaatcatgatttttattagtagtacatacttaattttactatttaatatgatgttaaaagtagctgggcaaagccaacttacgattaacaattggacggaaatcgttagtcatcccgccagtgtgatacttcttattatattcatattaagtgttgcctttctgatttatgtagagttttcattgttagtttatatggtttatgccggctttgatcgacagattattacatttaaatccatttttaaaaatgcctttgtaaatgtgcgtaaactcataggtgtaccagttattttctttgtcatttatttaatgttaatgatacccattgccaacctaggactaagttcagtattaacaaaaaatatttacatacctaaatttttaacggaagaacttatgaaaacgacgaaaggtataatcatttacggtacctttatgattgctgtatttatattaaattttaaattaatatttactctaccgttaacgattttaaaccgccagtcgttatttaaaaatatgagactaagttggcaaattacgaagcgaaataagtttcggcttgttatagaaatagttatattagaactcatcattggtgcgattttaacattaattatttcaggagcaacatatcttgctatttgtgtagatgaagaaggagataagtttttagtctcatcaattttatttgttgtattgaaaagcgcattgttcttctattatttatttacgaaattatcattaatcagtgtgttagtactgcacttaaaacaagagaatgtattagaccaaccgggcttagaatttaaatatccaaaaccgaaacggaagtctaggttctttataatttcaatggtgcttgcagtgacatgttttatcggttataacatgtacttactttacaataatactatcaatacaaatatctccattattggccatcgtggtttcgaagataaaggcgttgaaaattctattccgtcattgaaagctgctgcaaaagcgaatgtcgaatacgttgagttagatacaattatgacgaaagataaacaatttgttgttagtcatgataacaatttgaaacgtttaacaggtgttaataaaaatatttctgaatctaatttcaaagatatcgtcggtttgaaaatgcgtcaaaatggacatgaagcaaaatttgtatccttagacgaatttattgaaacggctaaacaatcaaatgtgaagctactagtagagttaaagccacatggtaaagaaccagcagattatacacaacgtgttattgatattttgaaaaagcatggtgttgaacatcaatatcgtgtgatgtctttggattatgatgtgatgactaagttgaaaaaagaagcgccatatctcaagtgtggttatatcattccgttgcagtttggtcattttaaagaaacatcattagatttctttgtcatcgaagatttttcttattcgccaagacttgttaatcaagcgcacttggaaaataaagaagtctatacttggactattaacggcgaagaagatttaacgaaatacttacaaaccaatgttgatggtattatcacagatgacccagcattagctgatcagattaaagaagaaaagaaagacgaaacatacttcgatcgttctataagaattttgtttgaataatataaacaaagacctctaaagttatcaagatgataccttcagaggtctttttaatgttgccatctatgggataggcaatcgtttcattcgtttatattcatatgacaagtatttgtatggcaatttggcgtcacaaacacttacatgatttattggtgaattattaattgttttgtgaatgcaaagggttagaaattgaattgtaaatactttctaatctttgtttcgctttagtcatttgatccaaatttttagtgcgtatagcggattttgcaatatagtgcgcagctaaaatatcgcgtttttgaaacgcatctaaatttaggtacgataatttatttaagtcagtgtttgctattaattcatgtaattgatctacaagcgcttgatgttgatacgtatgtgatgtagtttcagatttgcttgctaatttaataccagtcgtatcaaggagcgccgctttaataccagcaactaaatatgttttgattttcatttgtgttgtcatgctttgttactcctttgatgtacattaatcaaaaaaattatacactattgtatattgcaaagctaattaactataacaaaaagatagttaatgctttgtttattctagttaatatatagttaatgtcttttaatattttgtttctttaatgtagattgggcaattacattttggaggaattaaaaaattatgaaaaagcaaataatttcgctaggcgcattagcagttgcatctagcttatttacatgggataacaaagcagatgcgatagtaacaaaggattatagtgggaaatcacaagttaatgctgggagtaaaaatgggacattaatagatagcagatatttaaattcagctctatattatttggaagactatataatttatgctataggattaactaataaatatgaatatggagataatatttataaagaagctaaagataggttgttggaaaaggtattaagggaagatcaatatcttttggagagaaagaaatctcaatatgaagattataaacaatggtatgcaaattataaaaaagaaaatcctcgtacagatttaaaaatggctaattttcataaatataatttagaagaactttcgatgaaagaatacaatgaactacaggatgcattaaagagagcactggatgattttcacagagaagttaaagatattaaggataagaattcagacttgaaaacttttaatgcagcagaagaagataaagcaactaaggaagtatacgatctcgtatctgaaattgatacattagttgtatcatattatggtgataaggattatggggagcacgcgaaagagttacgagcaaaactggacttaatccttggagatacagacaatccacataaaattacaaatgaacgtattaaaaaagaaatgattgatgacttaaattcaattattgatgatttctttatggaaactaaacaaaatagaccgaaatctataacgaaatataatcctacaacacataactataaaacaaatagtgataataaacctaattttgataaattagttgaagaaacgaaaaaagcagttaaagaagcagatgattcttggaaaaagaaaactgtcaaaaaatacggagaaactgaaacaaaatcgccagtagtaaaagaagagaagaaagttgaagaacctcaagcacctaaagttgataaccaacaagaggttaaaactacggctggtaaagctgaagaaacaacacaaccagttgcacaaccattagttaaaattccacagggcacaattacaggtgaaattgtaaaaggtccggaatatccaacgatggaaaataaaacggtacaaggtgaaatcgttcaaggtcccgattttctaacaatggaacaaagcggcccatcattaagcaataattatacaaacccaccgttaacgaaccctattttagaaggtcttgaaggtagctcatctaaacttgaaataaaaccacaaggtactgaatcaacgttaaaaggtactcaaggagaatcaagtgatattgaagttaaacctcaagcaactgaaacaacagaagcttctcaatatggtccgagaccgcaatttaacaaaacacctaaatatgttaaatatagagatgctggtacaggtatccgtgaatacaacgatggaacatttggatatgaagcgagaccaagattcaataagccatcagaaacaaatgcatataacgtaacaacacatgcaaatggtcaagtatcatacggagctcgtccgacatacaagaagccaagcgaaacgaatgcatacaatgtaacaacacatgcaaacggccaagtatcatacggagctcgtccgacacaaaacaagccaagcaaaacaaacgcatataacgtaacaacacatggaaacggccaagtatcatatggcgctcgcccaacacaaaacaagccaagcaaaacaaatgcatacaacgtaacaacacatgcaaacggtcaagtgtcatacggagctcgcccgacatacaagaagccaagtaaaacaaatgcatacaatgtaacaacacatgcagatggtactgcgacatatgggcctagagtaacaaaataagtttgtaactctatccaaagacatacagtcaatacaaaacattacgtatctttacaacagtaatcatgcattctatgatgcttctaactgaattaaagcatcgaacaatcggaagcatatttctaaattatttattcattatagtcttaaacataacatgacctaatatattactaacctattaaaataaaccacgcacatctaagtgatatacgacaatcacagcaataataattgctttagaaagtcgtgccgaactggaacttacaagtctagttcgaacacacactgatgtgagtggttttctttattttaaacatgaacaatcagataagttactagcattagcaaatattattaaatcaaagggcttcgattcataaaatttaaaacaatgattaaaattagacgtgtaaatgttaaattctaaaacggaaataaccaccatcccattaaaccacttttttgttcaatcactatatttcacacagcttcattaataaaacgaaattgcttcaacccgcttcaacttcaactggcttcaacttcagcctacttcattcaataacaaaacgaatccgcttcatccaaaatcaaccattctaacgcacatattcaaatatagcagctgcacccatgccgacaccaatacacatcgtaaccatgccgtaacggctatcgggacgtctacccatttcattaagtaaacgcgcggttaacattgcgcctgtagcacctaatggatgacctaaagcaatagcgccaccattcacattcgtacgtgatatatctagacctacttctttaatagatgcaatcgtttgagaagcaaatgcttcgttcaattcgatcaaatcaatgtcttcaacagatagattgctgagtgacaatacttcaggaatcgcatatgcaggcccaatacccataattttcgggtcaacgcctactgccttaaaaccaacgaatcgtgcaataggtgtcacgccgagttctttcactttatctccagacattaaaactacaaatcctgcaccatcagaaagtggggcagatgttcctgcagtcacagtgccgtcagctttaaatactgtacgtaatttggctaatgcctccatcgtggtgtcagggcgtataaattcatcttggtcaaagatatttgtgtgtacttttggtcctgcgtttgtatattcaactgagtttacttgtattggaataatttcatctttgaaccgaccatcacgttgtgcgtcataggcacgttgatgacttctgacagcataagcatcttgatcttcgcgtgatacgtcaaattgggatgctacattttcagcagttaaacccataggatatgacgcacctatatcatcatattgtaaggttggattgtttgtgggctcgttgccacccattggtacggcactcatcaattcaacgccaccagctacaagtatatctccttgaccagccataatttgattggctgcaatcgcgatggtttgtaatcctgatgagcagtagcgattcactgtttgacccggtaccgtgtcagataatcccgcacgcaatgcaatcgttcgtgcaatgttttggccttgtaatccttctggaaaagccgtaccaacaatgacatcttcaatcatattcttattgaattttccgtcaatacgtttcaatacgccttgtaatactttggctgcgacatcatcaggtctttcgtggaataatgcgccttgctttgctttcgctgcggctgaacgcccataagctacaatgtatgcttcttgcatggttatcatcctctcttaatgactatcttttaattacgtaatggcttaccagtttttaacatatgtgcaattctttcatatgattttttagattttagtaagtcaataaagccaattttctccaacgattgaatgtaacgttgattgataaatgtatttcttggtaaatcaccacccgctaaaattgtggcgatatttaaggcaatatgataatcatggtcgctaataaaatgaccccgtctttgcgcatctaattgtccttggatcaatgctttgaagtcttcacctaaagcgatatattgatgtctaggattcggaatatagtttgtttctgcttcatatttcgcacgtttgagcgcaacttcgacacgttgtgctgtattgaaaataatcgtatctgtatcacgtaaataaccataacgacgtgcctcaaaggcatttgtagagactttcgcaaatgcgatattcgtcagtacttttgtcatggaagcttgtttgtcatcaaacttatgcgatgtgcgtaatatgcgatcagccatttctgcaaggccaccgccactcggtaataagccaacacctgcttcaacaagaccgatatatgtttcacttgcagcgacaacaataggtgagtaaagtacaagctcacagccaccgcctaaggcacgaccttgaacagctgtgactactggtttcaaactatacttcaaacgattaaagctataatgtaatttatcaattgattgtgcaacgacatcatctacaagaccgtcttcatgcgcctttttcattaagaaaaggttagcacccacactgaaattgttaccatctgcataaataaccatacttgtgtaatggtcattttccagtaaatcaatcgcatcaactaacgcatcgttgaattcatcggtaatgacattatttttactttgtaatttcagtaacagttgatcatcatgagttacggaaagtttggcatcacctttatcccaaagttcatcttttacgaagtgagaaataggtgttgcatattcaatggtctcatcttgtttataaaagccaccatctaaatcactaatccattgtggtaagtctccaagttcgtcttccatacgtgttttaacacgttcgtatcccattgcatcccataattggaatggaccaagtttccagttgaacccccagacaagcgcacggtctatgtctcggaaatcatcggtagctttaggtacattgatagcagagtaatagaaattattacgtaatgtctcccataaaaatagtcccgcttcgtcttgcgcattgaatatggtatcaaggttatgcactaagtctttattaaattcatttaaaattggtaattgtggttgcgatacaggtacataatcttgtttttcaacatcgtaaacaagtcgagctttagtttctttatcctttttgtaaaatccttgtttcgttttacgtccgagtgcgccattgtcaaacaacgtatttacaattttgacatcatgaaaataaggtgtttcttcaggtacttgttgcatgcctttaattacagacactgcaatatctaaaccgactaggtcagatagcgcatatgtacctgttttaggacgaccaatcgcttgcccagttaaagcatccacatctacaatgcttatcttgtgttgctcggcgcgatacataatatcattcattgtttgcgtgccgactctatttgcgacaaagccaggcacatcattgacgacaatgacacctttacctaacacattttgcgcgaaattttttacatctaatataatagattccttcgtgtgtgacgtaggtattaactccactaatttcataatacgtggtgggttaaagaaatgtagaccaaagaatcgttcttgatccttctcgttaaatgcttgagcaatcgcattaattggaatacctgatgtatttgtagcgaataaaccatcttctttagcatgttgtagaacttgttgccaaacagcatgcttaatttcaatatcttctttgactgcttcgatatataaatcagcatcatcatttaccaagtcatcatcaaaattaccatatgttaaatgactcgctagatttaagtcgaatagtagcggccgtttcttatctgtaattttatcgtaagattttttcgcaatgagatttggatcgtttttgtccactacaatatctaatagttttactttaagtccagcattcacaaaaagtgctgccagttgagcgcccattgtgcctgcgccaagaacggttactttattaattgtcatagtgattcctccaatttagttgaggataagataaccattaagataattggaataacgttgctattttataaaattaattaagtatctttgacagtcatcttagcctcttatttaaggaaaaagctttatgcttaaaataagtcttttttagtgaaattaatgcatctcatataattatttgctatttatacgaaagcagaatctccagtcaaagcgcgtccaattactaaggcattaatttcatgtgtaccttcgtacgtgtaaatcgcttctgcatcagagaagaaacgtgcaatatcataatcgtcagctagtatgccattaccacctgtaataccgcggcccatagctactgtctcacgcaaacgtaaggcattcatcatcttcgccgttgaagttgcaacctcgtcatattcaccatgtgcttgcatattagctaattgagcacatgttgccattgcttgagctaaattaccttgcatcattgctagcttttcttgtattaactgatatttactaattggtttgccgaattgcttacgctcagtgacataatctaatgtggcacgtaaagcgccagccataccacctgtagccatataagcaacgcctgctctcgttgaataaagaattttggcaatatctttaaagcttgttatgttttgtaagcgatccgcttcatctactttgacattagttaatttaattagggcgttaggaacaatgcgaagtgcgattttattatcaatgacttcaatatcgacgccatcttgttctggtctgactacaaagcaatggggtttgccagtttctttatttactgcgaatactggaatgacatcagatacatgtgcaccaccaatccatttcttttcaccattgataacccaagtatcgccttggcgttcagcgactgtttcaagacctcccgcaacgtccgaaccgtgttctggttcagttaaagcaaagcatgtacgcagttcatgtgactgtaatttaggtacatatttcgcaatttgttctttgctacctccgaaatagaaagtgttatgccctaaaccttggtgaacaccgagtagggtagctaaggaaatatcaaatcgcgcgagtaggtaagacatgaaaaactgaaatagttgactaggcattttggcgtttggacgatccttgtaaagtaatggattgttaaaataatttaattctcccagatctttaaaatagtcctcgggtacagtagcgtctatccaatgttgattaatattttcacggtacttactttctagcaatgaatctacttgttgtaaaaattcgacttcaccgtctgttaaacctttagcaatactaagtacatcttcaggaaataatgtttttaagaccgtttctttttcaaatgtcatataaattcctcctaaaaataatatgaatactaatgtgaaatgcatttaattcaaaaacaacacgctttatttgtaaacgcttacactaaatgtcaaaaatttttatcacctttaaagtgtttgcgagactttgtcattcatcatttgtcgaatcgcaagtttatctggtttctgcgtactgtttaacggcatatgtgtcactggtacatacattcttgggactttataacctgctaaacgacttcgcatatgttgatttaaaatttcagcgtaatgaggttcatcttcgcgaagtataatggctgcagcaattgattcaccatattttggatgatcatagccaacgaccacacaccggtctactagtggatgctcagctaaagcattttcgacttcggatggtaagacattttcgccaccagttatgattaattcttttttgcggtcaataataaatatatcgccatcgttgtccatcttcgctaagtcaccagttaataaatatcgaccatgaaatgctttggcagtctctgctggtttattccaatatcctggcgtgacatttttagccttaattgcaagttcgccaatctcaccagtaggtacttcctcaccgttatcatcaaggatacgtgcatcaacgaacatgactgctttaccaatactcattggcttacgttttgaattttccggtgtattaacaagtacaagaggtgcttcagttaaaccatagccgttaataatgtttatgccatattgtttaaaagctgcttggatacttggtaatggttgtgaaccaccttggatgatataatccatagctctaaaattttcaggattaaaattactagcacgtagcgtactataatacattgtcggaatcatgataataaatgtagggtgatattgtgcaatcatgtcattcaattcttcgccgttaaagtaacgttgaagaataagtgtgccacctgacattaatactggtaatacagtatcgttaaaccctaaaacatggaacattggtgttgatacaatcgtaatatagtttgaattgaacttatacgtcagctctaagtttgcaccgttatgaacaaatgattcatatgagaacatcacacctttaggtgatccggttgtaccacttgtataaattaatgctgcaagatcttgtggttcaacaggtgttgcttgaaaaggttggtgataatctggatttacgatttcatcatattgcgccacatcaatatccatatgcaataagttttggtcaatatcggtgagtgaacttaaatgtttttcagcatagaagagcagttttaattgtgcatcttccacaatggctgcaatttcttttgggttaagccgccaattcaatggtaaaaaaaccgcacctgttttaaaacaagcaaacaataaatctaatattgcaatatcatttggcgcaaaaataccgataacatcgccttttttaacaccttgagatgttaaataatgtgccatattatcagcgcgtgcattgagttgttggtatgtccaagatgtttgttttgcgtgatcaataacggcaggcttgtcatcatcgaagtctgaacgcgtttttatccaatcgaaattcattagtataccccctttagcttcactttcatactttatgaattgattgtttaagttgtccccatttttctttgtaaatgctggtatcaattaattttaaatgatcagcaataattggtttaaaagccatttgattcaaaatatctttatgcaaatcaagacctggtgcaatttcaattagtttcaagccttgattggtgagttcgaatactgcacgatcagtaacaaaatagatttcttgctcgagtgattgtgaatattgtgcattaaagtcgatatggctcacatctgatacaaatttctggttttgtccttcagtttcaatgtttaatcgttgattatggcatgagacatgactgccagctacaaaagtacctgaaaagataattttatttacagattgcgtaatgtctataaagccaccacatccatttagtcggtcattgaagtaagacacgttgacattgccgtattgatcaacctcagcaaagctaagataggcaactgatacaccattgttataaataaaatcccatgctcgatcatgaggcatgcgcacatctgcattgtaattcataccaaaatgttcacgactcccaacgaatccaccgaaaatgccaacatctaaaatcggttgcacatcatgttcaacacattcttcatgcaataaattagagagttcattattgatgccataaccgatgctaattgtatcgccataagttaaaaactgagcagcacgtcggagaatcaatttgcgactattaaaaggtaatgcgggttcaggtattccatcaattcgttcttctccagacaaggctggtaaataatgactttgaattacttggcggtgattcttttcatcttctgtgacgtatacataatcgacaagatttcctgggataacaacttcattcggttttagttgatagtcgtcaactaaagctttaacttgtacaataactttcccatgattggctttcgcgtttaatgcgacatgataacactcgctcaagtacgcttcttgagttaaataaatgttaccttgttgatctgcgtatgttcctctcagtagtgccacatcaacgctagggaatgtgtaatgtaagtatgtttcatcgttgatggttactaatgaaactaaatcatccgttgttcgtgtatttactttaccgccaccgtatctaggatcaacagctgtgtttaatccgattttagtaataactccaggtaataattgattactctgacgataatgagttgcaatgataccttgtggtaaaaaataagcttcaatgtcattatttttcattgcttgtgccgttttggaagaagccgttaaaatactcataatgacacgtttaatcatgcgacgttctataaaatcatctaaatccggtgcggcacctaaactatgaatatcattcgctaatataaacgttaaatcattgggcgtatgatatgtgtcatgttgcgctaacacagcacgtagaacttcggcgggtaagttggctacagctaatgctggtaaaccaatcacatcaccatctttaatgatatgttgtaagtcgtgccatgtgatttgtttcaagcaagtcacctccatcacatttgataaaatatagcgtttttacactttgtgtaaacccttacaagaaatataacataacgacgtttaaaatcaattagaaatatctttttattctgataatagacacaatatagacacattttgatggtcgataacaattgtaatatcaagggtttgtaatgaattgaatatcattaaaatacttatataaaaatattgttcggaatataaaaagttaaataggttttgatttttaaatatgaaatacaaagtgcccaatcgaacaaagtatttatattaaaatatggaaaatccatcaatattaaattaaaatagttttattatgaaaagtgaaagtaggtaagtctatggaaggtcttaatcatcgaagaaatacagaaaaagaagagacaacacaaacgcaatcagttgcacctaatacaggtgaagaggggatgtcatcagcaagtacacaatcaactaagacgtccgacatacataatgaatctatcgataaacaaatggaagctaaagcgcatgaaacagcgcaaaatacagatttaaaaaacgaagcaagaagtttatttgataatgcaaccaaatcaatcggtagactagcgggcaatgatgaaagcttaaatcttaatttaaaagatatgctttctgaagtatttaagccgcatactaaaaacgaagcagatgaaatatttatagcgggtactgctaaaactacgccagcaatttgtgacatatcagaagaatgggggaagccatggctcttttctcgagtattcatcgctttcacagtaacatttattggattatgggtcatggcagcaatttttaataacactaacgcgattccgggtctcatttttataggggctttaacagtaccattatcgggtttgttcttcttttatgaatcaaatgcgtttaaaaatattagcatttttgaagttattatcatgttctttattggcggcgtattttcattactaagtacgatggtattatatagatttgtcgtttttagtgatcaattcgaaaggtttggttctttaacatttttcgatgcatttttagtaggattagttgaagaaactggaaaagcactcattattgtttatttcgtcaataaattgaaaacaaataagattttgaatggattattaatcggtgctgctattggtgcagggttcgcagtttttgaatcagcaggttatattttgaatttcgctttaggagaaaatgtcccattattagatattgtcttcacacgtgcgtggactgcgattggtggtcatttagtttggtcagcgattgttggtgctgcaatagttattgcgaaagaacagcatggctttgaattcaaagatatttttgataaacgctttttaatattctttttatcagccgttgttttacatggcatttgggatacatctttaactgtacttggcagtgatacgttgaaaatatttattttaatcgttattgtgtggatacttgtattcattttaatgggggcaggtttaaaacaagtgaatttactgcagaaagaatttaaagaacaacagaaaaaagtagacgaataataattaaagcttatgttgctcatatgtttgtgacataagctatttttataatttgtctttaaaagagtggaataggaatactttttggagttaaaaaagtgtttcacgttaaacaaatagtgacaattagatttatataaaatgaacatgattcactgaaagtatgtaataatcattttattgaaattcatcaaacagaaattaatacaatcatataagcaaattaaaccacgccataatcatattggatgacttcggcgtggtttttatagttgaagcagggctgagacataaatcaatgtcccacactcccttatcgttcaatcgttgttcgataatcgattaaatagataccttcaggtgttactttataatttttaaccttagagttagcagcgactatttgatcgttgtaagcaatataactgtttggtacatctcgacttgataatttaataatatcattagaaatattgtgacgttccttaacatctacagtatgattcaattgattaattaaatcatcgacgttgctattattgtagtctcctttattaatagcaccatcttttttatatgcttgattaaagaaataacctgtatctccacgaggaattgttccgaaactatacatcgttgcatcccatgcagaacggtcttttaagtaaccttctatgtcatcaacacttttaatgtcgatttcaatatttgcttttttagcatctgattgtaatacttgcgcaattttcgatagctctggacgaccgtcatacgtaattaacttaatttttaaagggtgttcttttgtataaccatctttagctaataacatttttgcttgttcgatattttgtttggttaacttaggttctttaatatatggaattttatcattaaatggactcgttgcaggtttcgcataaccttgataaatatgatctgcaataccttgtctatcaatgatatgatctaatgcttcacgaacggatttagtcatttttttattagtatgattatacataagtaaagaagttctaaatccagattcttttgacacttttaaattttgattattttctatgtcttgaactttattaactgggacatcagttattaaatcatctttttgagattctaaatttctgacgcgattattgccgtcttcttggtacgtcacagtaatatgatcaagtttcggtttaccttgccaatagtccttaaaattcgacaatgatatttttcgagattgcttataatcttttatttggtaagggcctgtaccaacaggagtttgattaacatctgatttagcatctgtatcataaattgccataaaaggattagctaattcagatacaagttcagggtaagcggagttggttttaattgtcagtttttgacctttagcggtaattgatgatattggtaatgaatatttgaccaagtcgctttttttcatgctattttcaaggctagatttcactttttctgcagtcaatttttgaccgttttgaaatttaatattatcttttaattctatatctaacgttgtatcatttggttgatgatacgatttcactaatgctttttctatttttccttgatcatttgttttaaataatgattctgcagcaccaatcttaactggtacatctgtttcataaggtgcaatagactttgtttttaacggtaacgaaatatttaagtctttgccagatgaatgcattgagccacatcctgataacactaatactgctgaaaatatagttgctagtcttttaaacttcatttcattaacactctctttctaattactatgtaaaacccaacaattaatattttaaaactttattttgttaaagtaaaatgttgttcaagtttagtaattattaaagttcaattaattgtagtaattatgctttttaaaaataaatattagaaatgaagttagcgacatttatagtgattcacgataaacatatataactaagtattgagcaactgctgtagtactacagcttggttatgtttagtatcttttgctgcatataacaatagaacatgattatgctgatttacaatatcctttaatttttcaaaagcatctttttgcgcatcctgatcacgtaattctttttcatatttttctttaaaagctccaaaaagtttaggatcatgttggaaccattgtcgcaactcagtagaaggggcaatgtcttttaaccaataatctaggttagcagttcttttcgaaatacctctcggccagactctatcgactaggatacgaatagcgtcggtattatctttattgtcataaatccgtccaatatctacggtcatcttgtgaactcctttcttatgaaattcagtgagcatacatcaatgcatgttgtggtgggacgaccaaataaattttgcgaaaatatcatctctgtcctactcccaattaaaaaacagccatgacaaagtaaagtcatagctgttttggtatagatgtcatttatttttacgtttagttaaatacttcaaaccaactgcaaagaccgtgtacccggctatggtttgtatcaatgttttaattaaattattatttttaacaataatatttgcagtaacaatacttacgaaatataatgcaaatacttttacgtaacgttgattaagtttcatatgagcactaaacctcttttctcagttatactgcaacgcttagtcttggaataaatgtttcgtagtgtacgcgatccatatcgtaatttaaagatttaagtgcttcgatcatagattgtaagaattttgtaccaccacagatataaatttcaggtttatttgctaaaaatacttgtaattcttcagcaccaatatagccttgtttatcttttaagtgtgtatataatttagcgttgtcatgatggcttgcgatactgttgaagttgtctttgaaaggtaaatgttgttcattttcagcaacttgaaccatctgtgtatctaaacctttggcagaggcagcttcatacatagctactaaaggtgtaacaccaatacctgaacctaagaaaagttgtggttcagtcgtattctctaatacgaatccacctacaggcgcagctaaattaatcatatcgccttctttaatctcatcgtgtaaaattgttgaaacttcgccttcatgttctgttgtgacatcacgtttaacgccaaaagttaaatggtttttttcacctgatacgatagaatagtgacgtttagctctatatggaagtttatcactagaaacatcaactgtgatgtattggcctggtgtaaattcactaaagtcatattcttcagtttcaactgtaaatgatttaatgtcttcagattcttgtttaatattggtaattttgaatggtttaaaaccaatccacatcatttgatcataaatttctttttcaatttggatgaacacatccgcaataacgccatatgcttttgcccaagcttgaatgacagggtcattttcttctaatcctgtcacgtcttgaatggcttttaataaatttttccccacaattggataatgttcagcataaacttgtagtgcgcagtgtttatatgcgactggcataatgactggtttaataacacttaagttatcgatattaaccgctgcggccattacagcttgtgctaatgctgaagattgcatgcctcgtttttggttcgtttgattaaacatgtttaaaagttcaggatgcgctttaaacatttttggataaaagattgacgtaatttctgtccctttctctttaagtaaaggcaccgtttgtttgataatgtctttctcttgttctgtaagcatgatactcctcctttaatctgtatattttgattattctactaaaaatttcgatattcaattaattggtttgagaaaatataaataaaatggcaaatttgataattgtatgacatttttaattttttaaatacttatcaataagcattgtgtacaattgtctgtttgcacaccgacgattgagcgcatttatttgactaattcaaaaaacattgttgttttcctagaaaaaagtaaacatgataataaaaatgtgaaagtgtaaataatcactggcgaagtacgaagactaaagacatctaagatgtaatcgtatacaaattaaaaaggtgtaaaaattaaaataaaatgtgaaataaatcacaatttaatattgacccagtacttaatgcatgttacattttatatgtgaaataaatcacaaacttaaaagcggatgacacatgaccttttaagttatgcgttgaaaataaaagagatgtttatttgcttttgtatcgtcaataagcagcattaaactaacatatttgaagctacatgtatgttagtgaattaatcataagggagtttttgtaatgaacaaatttaaagggaacaaagttgtattaataggtaatggtgcagtaggttcaagctacgcattttcattagtgaaccaaagcattgttgatgaattagtcatcattgatttagacactgaaaaagttcgaggagatgttatggatttaaaacatgccacaccatattctccaacaacagttcgtgtgaaagctggcgaatacagtgattgtcatgatgcggatctagttgtcatctgtgctggtgctgcacaaaaacctggagaaacacgtttagatttagtatctaaaaacttgaaaatattcaaatcaattgttggtgaagtaatggcatcaaaatttgatggtattttcttggtagctacaaatcctgttgatattttagcgtatgcaacatggaaattctctggtttacctaaagaacgtgttataggttctggtacaattttagactctgcacgctttagattattgttaagcgaagcgttcgatgttgcgccacgtagcgtcgatgctcaaattattggtgaacatggtgacactgaattaccagtatggtcacacgctaatattgcgggtcaacctttgaagacattacttgaacaacgtcctgagggcaaagcgcaaattgaacaaatttttgttcaaacacgtgatgcagcatatgacattattcaagctaaaggtgccacttattatggtgttgcaatgggattagctagaattactgaagcgattttcagaaatgaagatgccgtattgactgtatcagcattattagaaggcgaatatgaggaagaagatgtttatattggtgttccagcagtcatcaatagaaacggtattcgcaacgtcgtagaaatcccattaaacgacgaagaacaaagcaagttcgcacattcagctaaaacattaaaagatattatggctgaagcagaagaacttaaataactttttataaaatctataccatcccaaaaattgtaaaaccttacccaaaaaattgtataaagggctatttgatacaactatatgtgtcgagtagccctatttttaatgtagtgaaagtcgttgttgaaattaaattcaaatctggcacttaagctttaatcatagcattaagatgattgtctagcagaggcgatttgcgggctcactacagtgcatgatgaacttaatgcttcaaatgtaacattaaaaataaaagcaacgatgtcacttcttacttcgtacatcgttgccattagttctgttgatatttcggttagtcttaatccccgagcaattcttcaatttcatttttgataactgtaacgtgaggcccataaattacttgcacaccagtgccttgctggattacacctttggcaccagtactttcgagtaatactttatcgactttgtcattttgatgaagtgtgacgcgtagtctcgttgcacaacagtcaacgatttcaatgttatctttgcctcccaaaccagcaacaatagtttgtgctctttcagtagcctcaacttgttgtgctgcagctttatcttctcgaccaggtgttttgaaattaaatttcgtaattaagaatctgaaaacgatgtaatacaaacagaaccacacaattccaataggtatgacgtataggtagtttgttttactattaccttgtagcacaccaaagagtaagaaatcgataaagcctccactgaaggtttgaccaattgtaatgttgaaaatgtctgccatcataaatgctaatccatcaaagaaggcatggattacataaagaataggtgcgacaaacaagaaactaaactctaaaggttcggtaatacctgttaaaaatgaagtgagtgcagcggataacattaaaccgccgacaacttttttatgttcaggtttagctgtgtgataaattgcaagtgcggcaccacataagccgaacatcatcgtaataaaacggcctgacataaagcgtgacacacctgaataatacttcgtcacatctggatcaccaagttgagcaaagaagatgttctgcgtaccttgaactaagtgccctttgacttctaaagtaccaccaagtgccgtctgccaaaacggtaagtaaaaaatatggtgtaaaccgagtggacctaacaatcttaagatgaagccataaacaaaagtaccgatggcacctgttttcgttacaaatccaccaacatgataaatgccggcttgtatgcttggccaaatgaaaaacatcaatacacctaaaaagattgcggcaaatgctgtgacaatagggacaaatctagagccaccaaagaaacctaaatacggtggtaataccactttgtgatatttgttgtgaagtattgcggtcataatacctgtgataatcccgccaaaaacaccggtttcaaccgtttgtataccgagcaccatgccttgtccattttgtgcaagctgatcttttgccaatgtgcccgtgatagttaataagccattcatagttgcgttcataattaagaaaccgagcagcgcagctaaacctgcagtacctttatcgcttctagataatccgattgcgacaccaattgcaaagatgaccggtaaattttggaaaacaatactacctgcagctgacattaatgtaaaaatattttgtaataaggtaatatctaaaatagggtatgctttaacggtgtttggattacttaatgcaccaccgatacccaacaatagacctgcagctggtaagattgcgataggtaacataaaggacttgccgaactgctgtgctttttcaaataaagatttcatcaacatccctcctaattattctcaatatagcttttgagaaatttaatatcaatatatattctgtgtatgaaaatatttttcataaaaattgtttgaatcatgtaacaatcatataaattgctgtttatattgttgtgaaaatgagttgacaaaagtcggtatagatatgtagacatcctatttttagcgaggtaggttgataaggcatatcggataaatttataagccataaaatagataaatagtgtttgtatccaaaaatatgagaaagttaaaactatttttcaaaataaacatgattcaccacataaataaatatacataagctatcgataacaacttaagaaaggtggatatataaatgaaaagaaagattattatggattgtgatccaggacacgatgatgcaatagcattaattttagcgggggcaattgacagtccactagagatattagctgtaacaacagtcgcaggtaatcaatcagttgacaagaatacgacaaacgccttgaacgtattggatattatgggacgccaagatatagcagtagcgaaaggtgcggataggccgttaattaaaccagctgcctttgcttctgaaatacatggggaatctggattagatggtccgaaactaccgtcgacaccatcacgtcaagcagttgcaatgccagcatcagatgtgattataaacaaagtgatgacgagtgatacacctgtaacaattgtagcgacaggtcctcttacgaatgtagcaacggcattgattcgtgagccaagaatcgctgagcatattgaatctattactttgatgggtggtggtacatttggaaattggacgcctacagcagaattcaatatttgggtagatgctgaagcagcgaagcgtgtttttgaaagtgggattactataaatgtgtttggtttagatgtaacacatcaagttttagccgacgatcacgtgattgaacgctttgaaagtatcaataatcctgttgcacagttcgtcgtagaattattgcaattctttaagaagacatacaagactcactttaatatggatggtggtccaatacatgatgcttgtacaattttgtatttgttacaaccagaattgtttacaatggtacccgttaatatcgacattgaacatcaaagtccactaacttatggcactatggctgtcgatttaaatcatgttacaggtaagcctgccaatgcttattttgctacagcagttgatgttgaagaagtgtggaacttgatagaccataagttacgtacatacgaataataatacttaattaaatagatacagttaaccctaaggcgcctgatataagcgtccttagggtttttgtattgggttacaatggtcatgacaatttgataatgattgagatatgtatgttaaaaatgcttcaaaaaaacacaaaacacaaaaatatatgcaaaaatttcaattgctttattttaaaagattaaaatcacaaaaaatatagatataattgaaatgttgttaaaacatcacaatgatgtacatgctcattttgaaaatatgtgttcaaagtgtgtacatcggtgtgacgattgatgataaattgagctcagatgctcaaaggagaatcgaacatgaacggggataatcagcaaatactcagagaaattgtattgaatcctactattcatggtaaagaacttgaatcgatatttggtttgtctcgtagacaactaggatatcgcattcaaaaaatcaatttgtggcttgaacaagagggttatccaaaacttgaaagaacaagccaaggaaattttattgtaagttctgaaatcatgacgttattcaagcgagatgtatcggagcagcaaatgttaaacggcaacaatgtcatttttagcatagaaacacgtcgttattatttaatgctcatgctttttagtaaggaaaacgcaatgtctctaaaccatttttcaattgatttacaagtcagtaaaaatactgtcattcacgatataaatcatgtgaaagagcaattggaaaatcatggtttgtcacttaagtattctcgaaaacatggttatgaaattgttggtgatgaatttgaagttcgccgtttcttcattaagttgattgatcaaaggttgaatcatgatattactaaaagtgaagttttaaaggcgctcaacttaacattcgaagatatcgcatatcaaaaagacaagatcaaacaggtagaacaatttttgaagagtcgctttatagacaaatcacttagttcattgccttatgtcctttgtgtgattcgtagacgaattcaaagtggtcatgtgatgaatccattaaatattaattatcagtatttgagggatacgaaagaatatcaagcaacggagattatgacgcaacatgagccggatttgccagaagcggaaaagttatatttgacattacacttactttcaacaagtgtgcaatggactgatttgcaagaatcagatagcatatcgaatttaacgatggccatcgctcaaatgattcaccattttgaacaaatcacttttattaacattgaagataaggagaaattatcacagcaactcttgttacatttaacgcctgctttttataggattaaatataacttaacggatcgtgatgaattaataaatcctttacaaggaaattatcaatccttatttcatatggtgaaacaatcatgtcaatcgttaactgaatatttcggaaaatcgttgcctgataatgaaatagcatatttaaccatgttgttcggaggtagtttgagacgtcaagatgaaaacttcgatggcaagataaaagctattatcgtgtgtacacaaggcacgtcagtatcacaaatgatgttatacgagttgcgaaacttatttccagaaattattttcttagatgcgatttcacttagaacatttgaaaattacacattagattatgacatcgtcttttcaccaatgtttgtcctaacacataaaaaattatttatcacaaaagtagctttatctgaaaatgagcaacgaaagttacgtaaagaagtgatgaagtacattaataaggaatcggctgacattgataaggaaataaacaagttaatggcattaattgaacgcacaacgacagttaatgacattacagaactacgtgatggtttagaagattttattgccaattataattcaatttcaaccattaatggatcgattgtcacacaaaataagacattagatttagctgacttgataccggcaaggcacgtgaaaagaatgcatcatgttgaaaatattgatgaagctattgctaaagcaagtgatgtgttagttgctaatcattttattgatattaaatatattcatgagatgcaacaggtatttgatgattcgtatatggttatcatgcaaaatattgctattccacatgcatactctgaaaagcatgtacataaaacagcgatgagtatgttgatattacaagaaccaatatacatgtcagatggcacagcaatccatattattgtacctattgctgctgttgataaagtgacacacttaagagcgttactacaattgagagatgtggcgcaagacaatgacgcaattaagcgcatcatacaaagtcgcaaaaattctgatgtaaatgagattttaaaaaattattcaaataaagaagcgagggaaaatggatgggacagcaattagtgcataaagaaaatataatgctcaatttgtcggcaactgataaagaatccgtattgtcacaaatgtcagatgtgttatttcaaaatgggttcgtgaagtcaacgtttaaagatgcagtcatcgacagagaaaaagaatttgctactggtttaccaacgcatctatgttcggtcgctataccgcatacagatgtcgaacatattaaccatagaacgataggtgtggctgttctagaaaaagaagtgccgtttattgaaatgggaacacttgatcaacagacagaagtgaaaatcgtttttatgttagcaatggataaagtagatgatcaacttaagctgttacaacagttgatgcaaatttttcaaagtgaagaaaaattggagcagattctacgaacgaaagatgaaacaattttagcaacactaatcaatgattatttggaatataactaaaaattaattggaggaattgaaaatgaaacaagtattagtagcgtgtggtgcaggtattgcaacgtcaacagtagtaaataatgcaattgaagaaatggcaaaggaacacaatattaaagtagatattaaacaaatcaaaattacagaagttggaccttatgaagacactgcagatttattagttacaactgcaatgacaaaaaaagaatataaattcccagttatcaacgcacgtaatttcttaactggtattggtattgaagaaacaaaacaacaaatcttaacagagttacaaaaataacggaattgatatgtaacgtgggtcgataacatattaatatatgcaaattgcatataaatgactatcacgacaaatgattgttgatgacatagaaacgcagtgactgtaattcaaaaggactgcagtcgaatttagcaagggttgtcgttgaaatgactgtaacgtcaaatgtaatcacaatcggaaagtatcgtgacaatgcatatataacagggagggtttaaatatgagttacttcactgattttgtaaggggatttttagatttaggtgcaactgttattttaccggttgtcatattcttgcttggcctattctttaggcagaaaattggagcggcatttaggtctggtttaacaataggtgtggcttttgtagggattttcttagtcatcgatttattagttaaaaatttagggccagcagcacaagcgatggttaaaaatttaggcgtcagtctgaatgtgattgatgtaggttggccagcaacatcatctatcgcttgggcatcatctgtcgcagcatttattattccactcggaatcatagttaacgttgtattgctagtaactaaagtgacaaagacgatgaatgtagatatttggaatttttggcattatacgtttacagcagcaatggtttatgccgtatcaggcagtatttggcaagcgttattagcagcagttattttccaaattatctgtttgaaagtagcagattggacagcaccgatgatgagtgagttctttgatttaccaggtgtatcgattgctacaggaagtacaatttcttatgcaccaggtatttacttagttaaattgttacaaaaagtacccggtctgaataagttagatgctgatcctgaaacaattcaaaaacgttttggcgcatttggagagtctatatttgtcggcttaattttaggtttaggtattggtgtgttagcaggttacaaacctggagacatcattaatttaggaatgtcaatggctgcagtaatggtattaatgcctagaatggtaaaaatcttaatggaaggtttaatgccagtttcagagtctgcaagaacatggctaaataaacgttttggcgaacgtgaaatttatattggattggatgcggctgtagcattaggtcatccagcagttatttcgacagcattaattttagtacctatcactgttttattagccgttattttaccaggaaaccaagtactaccttttggtgacttagcaacgataccatttgttgtcgcgtttattgttggtgcagcaagaggaaacattattcattctgtcattgtgggtacgattatgattgcaatttcactatatattgcaacagacgtagcacccattttcacagatatggcgaaaggtacgaatgtacaaatgccaaaaggttcatctgaaatttcaagtattgatcaaggtggtaatatcgttaactatcttatctttaaactatttagtctattcaattaaaaatcgaggtgtttgtggtgaaagctttagtaaaaacaagagaaggacatggcaacttagaacttcttgataaagaagttgcaacaccgctagatgataaagtaaagattaaagtacattatgcaggaatttgtggcacagatattcgtacttatgaaggtcattataaagttaattttccagtgacattaggtcatgaattttctggtgaaatcgttgaagttggagcagacgttaaagattttaaagttggtgaccgtgtcacatctgaaacgacattctatgtttgtaatgagtgtgaatactgtaaatcaaaagactataatttatgcaaccatcgaaaaggtattggaacacaagttgatggcgcatttactaattatgtcattgcacgtgaagaaagtttgcatcatattccagacgaagtatcgtatcagtctgcagctatgacagaaccattagcatgtgcatatcatggcgtttctaagattcaagtcaattcaggcgatgtagcagttgtaatgggacctgggccaatcggattacttgtagcacaagtgttaaaaagtaaaggcgcaactgttgtggtaactggattggacaatgacaaagtcagattagataaagcagaagcattgcacatggattatgtagtcaatttacaacaaacagacttaaaaacgtatatcaatggaattacagacggttacggtgcagatgttgttgttgaatgttcaggtgcagttccagcagcacgacaaggtttggatattttacgcaaaaaaggtttctacagtcaaataggtatttttaaggatgctgaaattccatttgatatggaaaaagtgattcaaaaagaaataacagttgttggtagtagaagtcaaaagccagcagattgggaaccttcattgcaacttatggcggatggtttagtaaatgctgaagctttggtgacaaaaatatatgatatttcgaaatgggacgaggcgtatcaacatttaaaatccggcgaaggtattaaagtattacttaagccgctcgatttagatgaaaatgaaggagagaattaatatggtagaatcaatgctaacttttatgcttgggccattaagacaaatcactgatttttatatggaacatttactcgtaagtaattccattgtcattgcaggttattttgcgacaggtatttttaaaaagaaaaaagttgtgaattaaatcaaatttgaggtgatttacaagtgaaagcattgaaattatatggcgtggaagatttacggtatgaggataatgaaaagccagtcattgaaagtgcgaatgacgttattattaaagtacgagcgactggcatatgtggttcagacacgtcacgatacaaaaaaatggggccatacattaaaggtatgccatttggtcatgaattttcaggtgtagtagatgccattggaagtgatgttacgcatgttaatgtgggcgacaaagtgacaggttgcccagcaataccttgttatcaatgcgagtattgtttaaaaggtgaatatgcacgatgtgaaaagttattcgtcattggctcatatgaacctggatcgttcgcggaatatgtcaaattgccagcgcaaaatgttttaaaggttccagacaatgttgattacattgaagcagcaatggttgagccatcagccgttgttgcgcatgggttttataaatcgaatatacaacctggtatgactgttgcagtaatggggtgtggcagtataggtttgttagctattcaatgggcacgaatatttggtgctgcacatatcatcgctatagatatagatgcgcataaactagatattgcaacatcattgggcgcacatcaaacaatcaattcaaaagaagaaaatcttgagaaattcatcgaaaatcattacgccaatcaaatcgatttagctatagaatcatcaggtgctaaagttacgattggtcaaatattgacgctacctaaaaaaggtggcgaggtggtattactcggaataccatatgatgatattgagattgatcgcgttcattttgaaaaaattctgcgtaacgagttgacagtatgtggctcttggaactgtttgtccagtaattttccgggcaaagagtggacggcaaccttacattatatgaagacgaaagatattaatgtaaagcctattatttctcattttttaccgttagaaaaaggcccggagacatttgataaattagttaacaagaaagaacgatttgataaagtcatgtttacgatttattagtatgcacctttgaggacgaaaacgctggtatagttatagctatgaaagtgcgaatgccgtctggtctatagatactatcgaaataattcatcttcgaatatacgttgataaatagccggtttacttgtgtgaaatatgcttgtgaatcggttgttttgcattttgtatacttaaaatgagatggcaatatttgataatttttaaagtgaaaatcaagtacagccacttaataagataaatttattataatatatggtaaaatgatggcagtaataatgaatttgaaaaagagtaaacattaatacctttaacaatttaatatcgtcagagttaatgattaactgcatggcaaaacaacttagaatggtcagttacaaaaatacatttttataaaaaattatcacactattgtgacaactatctttggattaataaaagaggcaagtgagcaataggttaggcttatgtgcgggcataggtcagtaatgtataaatggaaatgatgtaatgacagaatggaggacaacatgatttatgcaggtattttagcaggaggtattggttcgagaatggggaacgtgccattaccaaaacaatttttagatattgataataaaccgattttaatccatacaattgagaagttcattttagtgagtgaatttaatgagattattatcgcaacgccagcacagtggatttcccatacacaggatattttaaaaaaatataacattacagatcaacgtgtcaaagtagttgcaggtggtacggatcgaaatgaaacaattatgaacattatcgaccatattcgcaatgtaaatggaattaataatgatgatgtgattgtaactcatgatgccgtaagaccatttttaactcaacgtattattaaagagaacattgaagtagcagcaaaatatggtgcagtagatacagtcattgaagcaattgatacgattgtaatgtctaaagataaacagaacatacacagtatccctgtaaggaatgaaatgtatcaaggccaaacaccacaatcatttaatattaaattattacaagatagttatcgcgccttaagtagtgaacaaaaagaaatcttatcagatgcatgtaaaatcattgtcgaatctggacatgcagttaaattggtacgtggagaactatacaacattaaagtgacaacaccgtatgatttaaaagtagcaaatgccattattcaaggtgatattgccgatgattaatcaagtatatcaactcgttgcaccgagacagttcgacgtcacatataataatgttgatatttatggtaatcatgtcatcgtaagacctttatacttgtctatttgtgcagctgatcaaaggtattacacaggtcgaagagatgaaaatgtactacgcaaaaaattaccaatgtcattagttcatgaagctgttggtgaagttgtatttgatagtaaaggggtatttgaaaaaggtacgaaagtagtaatggtaccgaatacacctacagagcaacatcatattattgcggagaattacttagcctctagttattttagatctagtggttatgatggttttatgcaagactacgttgtgatggcacatgatcgtatcgttccgctgcctaatgacattgatttgagtacgatttcatacacagagttagtgtcagtaagttatcatgctatacaacgatttgaacgtaaatctatacctttgaaaaccagctttggtatttggggtgatggtaacttaggttatattactgctattttgctacgtaagttgtacccagaagctaaaacttatgtatttggtaagacagactataaattaagtcatttttcatttgtagatgacatctttacagtaaatcaaataccagatgatcttaaaattgatcatgcatttgaatgtgttggaggtaaaggaagtcaagttgcacttcaacaaatagttgaacatatttcaccagaaggcagtattgctttgttaggcgtaagtgaattacccgtggaagtgaatacacgattagtacttgaaaaaggattaacgttgattggtagtagtcgaagcggctctaaagattttgagcaagttgttgatttatatcgtaagtacccagacatagttgaaaagttagcattattaaaaggacatgaaattaatgtatgtacgatgcaagatatcgtccaagcgtttgaaatggatttatcgacatcttggggaaaaacagtattgaaatggacgatttaataaaccgatgggggaataacaatgacaaaaacgaaacaagcaatacatattgataacatatactgggaacgtgttcagttatatattgaaggacatagtgaaggtgtcgatttaacatcaggacaatttgttctgaggaatttaaccgaaacaaaaacattagaagcaaatgaaatgaaaatagacggtaatacatttatatgtagattcaacgtcgcaatattagacgatgggtattatttaccaatggataaatatttatttgtttatcatgaccagttagagtatattggacaacttaatccaaatattattgatcaagcttatgcggcattaaatgaagagcaaattgaagaatacaatgagctgactacacaaaatggaaaagtgaactatttattagcgtatgatgctaaagttttccgtaaaggtggcgtatcacaacatacggtctataccattactccggaaatagcaagtgacgttaacgaatttgtatttgatattgaaatcaccttacctcaagagaaatcaggggtcattgcgacaagtgcacactggcttcataaacaaggtcataaagcttcatttgaaagtagaagtttcttatttaaagctatttttaatattacaaagttactacatattaaaagaagcaaaacaatattattcacatcagattcgcgtccgaatttatcagggaatttcaagtatgtatatgatgagttactacgccaaaaagtagattttgattatgatattaaaacggtatttaaggagaatattacggatagacgcaaatggagagacaagtttagattgccatatttacttggtaaggccgattatatttttgttgatgatttccatccattaatttatacggttcgctttagaccatcacaagaaattattcaagtgtggcatgctgttggtgcctttaaaacagttggctttagtcgtacaggtaaaaaaggtggtccgtttatcgattcattaaaccatcgtagttacacgaaagcatatgtttcatcagaaaccgatattccattttatgctgaagcatttggaattagagaagaaaatgttgtaccaacaggtgtaccacgtactgatgtactatttgatgaagcttatgcaacacaaattaaacaagagatggaagatgaattgccaattataaaaggtaagaaagttattctattcgcaccgacatttagaggtaatggtcacggtacggcacattatccattttttaaaattgattttgaacgtttagcaagatactgcgagaagcataatgcagttgtgttattcaaaatgcatccgttcgtaaaaaatagacttaatatttcacgtgaacatagacaatactttatcgatgtgtcagatcatcgtgaagttaacgatattctctttgttacagacttgttgattagtgattattcatctttaatatatgaatatgcagtatttaaaaagccgatgattttctatgcatttgacttagaagattacattacgacgcgtgatttctatgaaccatttgaatcatttgttccaggtaaaattgtacagtcctttgatgcattaatggatgctttggacaatgaagattatgaggttgaaaaagttgtgccattcttagataaacattttaaatatcaagatggtcgctcaagtgaacgtttagtcaaagatttgtttagacgctaatgttggcatatattacttgccatgcaaatgagtcataaggcatagttttcaagaagggttctgacaatgaagtgagcaacatgtcatgatgagaagcaggactatacaatgagaataaccttttgatttttcatgcataaggcgattcaatcaaaagcaatcaccttccaactgaattgtcattttgtaaaataaaataatcgatccaatcgttatctaattcataaatgtgtaaacacatacgttatgaatggataacgattttttgttatgttaaagtggtacattaatcatgtatttcgtatgataattaacgacaagtgtaatggttaaatgtattttatgatgaaatgctataataggcatggttacaatgagcttgctcatacatattaatataattacaaaaacacgtcggaggtacgacatgattaaaaatacaattaaaaaattgatagaacatagtatatatacgacttttaaattactatcaaaattgccaaacaagaatctaatttattttgaaagctttcatggtaaacaatacagcgacaaccccaaagcattatatgaatacttaactgaacatagcgatgcccaattaatatggggtgtgaaaaaaggatatgaacacatattccaacagcacaatgtaccatatgttacaaagttttcaatgaaatggtttttagcgatgccaagagcgaaagcgtggatgattaacacacgtacaccagattggttatataaatcaccgcgaacgacgtacttacaaacatggcatggcacgccattaaaaaagattggtttggatattagtaacgttaaaatgctaggaacaaatactcaaaattaccaagatggctttaaaaaagaaagccaacggtgggattatctagtgtcacctaatccatattcgacatcgatatttcaaaatgcatttcatgttagtcgagataagattttggaaacaggttatccaagaaatgataaattatcacataaacgcaatgatactgaatatattaatggtattaagacaagattaaatattccattagataaaaaagtgattatgtacgcgccaacttggcgtgacgatgaagcgattcgagaaggttcatatcaatttaatgttaactttgatatagaagctttgcgtcaagcgctggatgatgattatgttattttattacgcatgcattatttagttgtgacacgtattgatgaacatgatgattttgtgaaagacgtttcagattatgaagacatttcggatttatacttaatcagcgatgcgttagttaccgactactcatctgtcatgttcgacttcggtgtattaaagcgtccgcaaattttctatgcatatgacttagataaatatggcgatgagcttagaggtttttacatggattataaaaaagagttgccaggtccaattgttgaaaatcaaacagcactcattgatgcattaaaacaaatcgatgagactgcaaatgagtatattgaagcacgaacggtattttatcaaaaattctgttcattagaagatggacaagcgtcacaacgaatttgccaaacgatttttaagtgataacttaaaaacaataaaaaattataaattaattagttaagtgatataaataataaacgaaatgtttgcttgtatgttattatttgtgtatgaaaacgtctgatataatgtaatataggtttaaacaaaatatgctaaaatataagcaaaatatgtataattttaagtaatacacagacatttagagttttgattttaaaatgagttttcaattggaaaatgcaacgaaatttaaataattaaatatagatatagttgaatggaggaagtattttatgaaatacgctggtattctagctggaggtataggctcaagaatgggtaacgtacctttacctaaacaatttttagatttagacaacaaaccgattttaatccatacattagaaaaatttattttaattaatgattttgaaaaaattattatcgcgacgccacaacaatggatgacgcatacgaaagatacacttagaaaattcaaaatttctgatgaaagaattgaagtcattcaaggtggtagcgatcgtaacgatacaattatgaatatcgttaaacatattgaatcaacaaatggtattaacgatgacgatgtcattgtgacacatgatgcagttagaccatttttaacgcatcgtattattaaagaaaatattcaagctgctttagagtacggtgcagtagatacagtgattgatgctatagatacgattgttacatctaaagataatcaaacgattgatgcaattccagtgcgtaatgaaatgtaccaaggtcaaacacctcaatcgtttaatattaatttattaaaagaaagctatgcacagttgagtgatgagcaaaagagtattttatctgatgcttgtaagattattgtagaaacaaacaaaccggttcgacttgtaaaaggtgagttatataacattaaagtaacaacaccttacgatttaaaagtagcgaatgctattattcgaggtggtattgccgatgattaatcaagtatatcaattagttgcacctagacaatttgaagttacgtataacaacgtagatatttacagtgactatgtcattgtacgtcctttatatatgtcaatttgtgctgccgatcaaagatattatactggtagccgtgatgagaatgtcttatctcagaaattgccaatgtctttaattcatgaaggtgttggtgaggtcgtatttgacagtaaaggtgtgtttaataaaggtacaaaagtagttatggtaccgaatacgccgacagaaaaagacgatgtcattgctgaaaactatttaaaatcgagctacttcagatcaagtggacatgatgggtttatgcaagattttgtgttgctaaatcatgatagagctgtaccactacctgatgatattgatttaagtattatttcatatacagagcttgtaacagtaagtttgcatgctattcgtcgttttgaaaagaaatctatttcaaataaaaatacatttggtatttggggtgatggtaacttaggttacattacagccattttattacgtaaattatatccagagtctaaaatatatgtctttggtaaaacagattataaattgagtcacttctcatttgttgatgatgtcttctttattaataaaatacctgaaggcttaacatttgatcatgcatttgagtgtgtgggtggtcgcggtagtcaatcagccataaatcaaatgatcgattacatttcaccagaaggaagcattgcactgttaggtgtaagtgagttcccagtagaagttaatacacgtctagtattggaaaaaggactaacgttgattggtagtagtcgaagtggttcaaaagatttccaagatgttgtagacttatacattcaatacccagatattgtagataaattagcgttgttaaaaggtcaagaatttgaaattgcaacaattaatgatcttacagaagcttttgaagcagacctgtctacatcttggggtaaaacagtattaaaatggattatgtaaatagaaaaggatgaattaacgttggttaaaagtaagatatatatagataaaatctattgggaacgtgttcagttattcgttgaaggacatagtgaaaacctagatttagaagatagtaattttgtattaagaaatttaactgagacacgtacaatgaaggcgaatgatgtcaaaatagatgggaatcaattcgtttgtcgtttcaatgtagctatcttagataatggttattacttacctgaagataagtacttattagtgaatgagcaagaacttgattatattgcacagttaaacccagatgtgattaatgatgcatatcaaaatctaaagccagaacaagaagaagaatacaacgaattagaaacacaaaatggtaaaatcaatttcttattgcagacttacctaaaagaatttagaaaaggcggcatttcgaagaaaacggtttatactgttacacctgaaatttctagcgatgttaatgaatttgtccttgatgttgttgtaacgactccggaagttaaaagtatttatatcgttcgtaaatataaagaattacgtaagtatttccgcaaacaatcatttaatacaagacaatttatttttaaagcgatatttaatacgacgaaatttttccacttgaaaaaagggaatacggtgttgttcacatcagactctagaccaacgatgtctggaaactttgaatacatctataacgaaatgttacgtcaaaatttagataaaaagtatgatattcacactgtttttaaagcgaatattacagatagacgtggcatcatcgacaagtttagattgccatatttacttgggaaggcagactacatctttgttgatgactttcacccattgatttatacagtgcgttttagacgttctcaagaagttattcaagtatggcatgccgttggtgcctttaaaacagttggctttagtcgtactggtaaaaagggtggaccatttattgattcattaaatcatcgtagctatacaaaagcttatgtatcatctgaaaccgatattccattctacgctgaagcatttggtattaaagagaaaaatgtagtgcctacaggtgttccacgtactgatgtactatttgatgaagcttatgcgacacagatcaaacaagagatggaagatgaattaccaattattaaaggtaagaaagtcattcttttcgcaccaacatttagaggtagtggtcatggtacagcacattacccatttttcaaaattgattttgaacgtttagcaagatattgcgaaaaaaataacgcggttgtattatttaaaatgcatccatttgtgaaaaatagacttaatattgcagacaaacataaacaatattttgttgacgtttctgactttagagaagttaatgatatactgttcataacagatttattaattagtgactattcatctttaatatatgaatatgcagtatttaaaaagccaatgattttctatgcatttgatttagaagattatattacgacgcgtgatttttatgaaccatatgaatcatttgttccaggtaaaattgtgcaatcatttgacgcattaatggacgccttggacaatgaagattatgaaggagaaaaagtcattccattcttagataaacattttaaatatcaagatggccgatcaagtgagcgtttagtcagaaatttatttggtagctaagtttatatagtagtcaaagtgggagaggtataatgatgaaattttcagtaatagttccaacatacaattcagaaaagtatataacagaattacttaatagccttgcgaaacaagattttccgaaaactgaatttgaagtggttgtagttgatgactgttcaacagatcaaacgttacaaatagttgaaaagtatcgcaataaattgaacttgaaagtaagtcaactcgaaacaaattctggtggtccaggtaaacctagaaatgtggcgttaaaacaagcagaaggtgaatttgtattatttgtggactccgatgactatataaacaaagagactttaaaggatgcagcagcatttattgatgaacatcactcagatgtcttattgattaaaatgaaaggtgttaatggtcgtggtgtaccacaatctatgtttaaagaaacagcacctgaagttactttgttaaattcaagaattatctatactttaagcccgactaaaatctatagaacagcattactaaaagataatgacatttattttccagaagaattaaagagtgcagaagatcaattatttacaatgaaagcatatttaaatgcaaatcgaatcagtgtgttaagtgataaagcgtattattatgctacaaagcgtgaaggtgaacatatgagtagtgcgtatgtttcacctgaagacttttatgaagtcatgagattgattgctgtagaaatattaaatgcagatttagaagaagcccataaaaatcaaatcttagcagaatttttaaatcgtcattttagtttttctcgtacgaatggcttctcacttaaagttaaactagaagatcaaccacaatggattaatgctctaggagactttatacaagcagttccagaacgtgtagatgcattggtgatgagtaaattacgaccattgttgcactacgcgagagcgaaagatatagacaactatagaactgtggaagaaagttaccgtcaaggtcaatactaccgttttgatattgtagatggtaaattaaacattcaattcaatgaaggcgaaccatactttaaaggcattgatatcgctaagccaaaagtgaaaatgacagcatttaaatttgataatcataaaattgttacagagctaacgttaaatgaatttatgattggcgaaggacattatgatgtcagacttaaattacattcacgaaacaagaagcacacaatgtatgtacctttaagtgtcaatgcgaataaacaatatcgttttaacattatgttagaagatattaaagcgtatttacctaaagaaaaaatttgggatgttttcttagaagtccaaataggtacggaagtatttgaagtgcgtgttggtaatcaacgtaataaatatgcatatactgcagaaacaagtgcattaattcatttgaataatgatttttatagattaacaccgtatttcacaaaagactttaataacatttcgttatactttacagctattacattaacggattcaatctcattgaagttaaaaggtaaaaacaaaatcattttaactggtctggatcgtggttatgtatttgaagaaggtatggctagtgtcgtactaaaagacgacatggtgatgggaatgttaagccaaacatcagaaaacgaagtgcaaatcttacttagcaaagatattaaaaagcgagacttcaaaaatattgttaagttaaacactgcacatatcacttatccactaaataaataataaatgccctcaaatcattgtgagccaacatgatttgagggctttattttgctgtttatgacatgattatgacatttccctgattttcattttcatatacattaaattgtatacactggaaatgaggaggttatctataatgataaataaaaatgacatagtagcagatgtagtaactgattatccgaaagcagcggatatttttagaagtgtgggaatagatttttgttgtggcggacaagtaagtatagaagcagcagccttagaaaagaaaaatgtagatttgaacgaattattacagcgtctcaacgacgttgaacaaacgaatacaccaggttcgttaaatcctaaatttttaaatgtttcatcacttattcaatatattcaatcagcatatcatgaacctctaagagaagaatttaaaaatttaacaccttatgtgacgaagttatcgaaagtacatggacctaatcatccatatttagttgagttaaaagaaacatacgatacatttaaaaatggcatgttagagcatatgcaaaaagaagacgatgtcgattttccaaaactcattaaatatgagcaaggtgaggtagtagacgatattaatactgtgatagatgatttagtttcagaccacattgcaacgggagaattgttagtaaaaatgagcgaattaacatctagttatgaacctccgatagaagcgtgtggtacttggcgacttgtttatcagagattaaaagcacttgaagtgttaacacatgaacacgtacatttagagaatcacgtattatttaaaaaagtatcataaataacgcgattagaaactgttggcaaaaataagtccagcagtttttcgctatgtataaaagtcataatagtgacataaacagcattatttgaaaagaaaaatggtcaacttagcataaaaattgatatgaaaatttaatggtatagataattaaatagtagcgtgtttttttaataatttattcatgaattttacatgcactattatgataaaataaacataattataattcactgaggtgctatcgtgctatcgctaacaatgttattacttgagcgtgtaggtttaattattattttggcctatgtgttgatgaatattccatattttaaaaacttaatgaatcgtcgacgtacatggaaagcacgttggcaattatgtattattttcagtttgtttgccttaatgtctaatttaactggtatcgtcatcgatcatcaacatagtttgtcaggaagtgtgtacttccgtttagatgatgatgtatctttagctaacacacgtgtattaacgataggtgtcgcaggattagttggtggcccttttgtaggtctatttgttggcgttatttcaggtattttcagagtgtatatgggtggggcggatgcacaagtttatcttatctcatctatatttattggtataattgctggttattttggcttacaagctcaaagacgcaagcgttacccgagtattgcgaaaagtgccatgattggaattgttatggaaatgattcaaatgttgagcattttaacattttcccacgacaaagcatatgcggttgacctcatatcattaattgcactaccaatgattattgttaatagcgttggtacggcgatttttatgtctattatcatttcaacattaaagcaagaggagcaaatgaaggctgttcaaacacatgatgtactgcaattgatgaaccagacattgccgtattttaaagaaggattgaatagagaatcggcacagcaaattgcgatgattattaaaaatttaatgaaagtatctgccgtagcaattacaagcaaaaatgaaatcttatcgcatgtaggtgcaggtagtgatcatcacataccaacaaatgaaatattaacaagtctgtctaaagatgtattgaaatcaggaaagttgaaagaagttcatactaaagaagagattggttgtagtcatccgaattgcccgcttagagcagctatcgtgataccacttgagatgcatggttctatcgtcggtacattgaagatgtattttacaaaccctaatgatttaacttttgtggaacgtcaacttgcagaaggattggcaaatatttttagtagccaaattgaacttggtgaagccgaaacgcaaagtaagttattgaaagatgctgagattaagtcattacaggcacaagtgagtccacattttttcttcaattcaattaacacgatctcagctttagttagaataaatagcgaaaaggcacgagagttactattagaattgagttattttttcagagcgaatttacaaggctctaagcaacatacgattactttagataaagagttaagtcaagtgcgtgcatacttatcactcgaacaagcacgttatccaggaagatttaatatcaatattaatgttgaagacaaatatcgcgatgtgcttgtaccaccatttttaattcaaattttagttgaaaatgccatcaaacatgcgtttacgaatcgaaagcaaggtaacgatattgacgtgtcagtgattaaagaaactgcaacacatgtacgtattattgtacaagataatggtcagggtatttctaaagataaaatgcatttgttgggagaaacatctgtagaatcagagtctggaactggtagtgctttagaaaatttaaacttacgcctaaaaggattatttggaaaatccgcagcattacaatttgaatcgacatcgagcggtaccactttttggtgtgtacttccttatgaaagacaagaggaggaataaatatgaaagcattaatcatagatgatgagccattagcacgtaatgaattaacatatttattaaatgaaattggtggttttgaagaaattaatgaggcagaaaatgtaaaagaaacattggaagcactactgatcaatcaatatgacattatatttttagatgtcaatttaatggatgaaaatgggatcgaattaggagctaagattcaaaagatgaaagagccacctgcgattatttttgcaactgcacatgaccaatacgcagtacaggcatttgaattaaatgcgacagactatattttgaaaccgtttggtcaaaaacgtattgaacaagcagtcaataaagtgcgtgcgactaaagccaaagatgataataacgcaagtgcaattgcgaatgatatgtcggcgaattttgatcaaagcttacctgttgaaattgacgataaaattcacatgttaaagcaacaaaatattattgggattggcacacataatggtattacaaccatacatacaacgaatcataaatacgaaacaacagagccattgaatcgttatgaaaaacgattgaatcccacttattttatacgtattcatcgttcatatattattaacacgaaacacattaaagaagtgcaacaatggtttaactatacttatatggtaatattgacaaatggtgtcaagatgcaagttggacgttcatttatgaaagattttaaagcgtcgataggattactttaacagtaatccttttttttatgcattttacctatgatattttgtatttcggactaaaaatcacgcaaatcgaagtgagccatctatactttagttaaatcaaacgtaggaggcaatggtcgtgaaacaacaaaaagacgcatcaaaaccagcacacttttttcaccaagtcattgtaattgctttagtactctttgtatcgaaaataattgaatcatttatgccaattcctatgcctgcatcagtaatcggtttagtattattatttgtattattatgtactggtgctgttaagttaggcgaagtcgaaaaagtaggaacgacactaacaaataacattggcttactcttcgtaccagccggtatctcagttgttaactctttaggtgtcattagccaagcaccatttttaatcattggactaataatcgtctcaacaatactattacttatttgtactggctatgtcacacaaattattatgaaagttacttcgagatctaaaggtgacaaagtcacaaaaaagatcaaaatagaggaggcacaagctcatgattaaccacttagcactaaacacaccttacttcggaatactgttatccgttataccatttttcttagcgaccatattatttgaaaaaactaatcgtttcttcttattcgcaccgctatttgtcagtatggtatttggtgtggccttcctctatttaacaggcattccgtataagacttacaaaataggtggagacattatttacttcttcttagaaccggcaacaatctgttttgcgattccgttatataaaaagcgtgaagtgcttgttaaacattggcatcgtatcatcggaggtattggtatcggtacagttgtagcgttattaattattttaacttttgcgaagttagcacaatttgccaatgatgttattttatcaatgttacctcaagcagcaactacagcgattgcgttaccagtatcagctggtatcggtggtataaaagaattaacatcattagcagttattttaaatggtgtcattatttatgccctaggtaataaattcttaaagcttttccgaattactaaccctattgcccgaggattagcacttggaacaagtggtcacacattaggtgtagcaccagccaaagaattaggacctgtagaagaatcaatggcaagtatagctttagtgttagttggtgtagttgttgtagcagttgtgcctgtctttgtagcaatattcttctaaaacgaaaaacctaagcaagataatagcaatttgagccattgttattatcgtaaaaaaacgtctatactccagtttataactgggatatagacgtttttatgtatttattactttttactaggaatataaaactgtgcatgacgataatgaaatacgatgtcagatgaatcaaagggtttgccagtcattgtataaaaagtctggtggtaacgtaaacatggttcacctgtagacaattgtagtaatgaagcttcacttgaagtgagttgatctacattaaagaaaatatctgaaaaaccaatacgaagtttcatgtttgattctaaatagtcgaagatagagcccttagcaatatcatcatttaaatatttcacgatttctttatgataataagaatattcgatacataaaacatcatcgtccacgaatcttaatcgctctaaatagtagacggtatcatctgcatttaattggagctcatcttgtacagatttaggtggcgttgcaatctccttaaaaacaagtaccttacttgtcattcggtgttcacctaaacttttagagaaaccattagtcttaaagacgttgatacgattggcatcagcaatatttctcacataaataccactgccttgtgcttgatagatcaaaccatcttgttccaataagcctaatgctttaatgatagtactcttacttacttgataacgttcttttaattgcgtcacgcttggcaatttatcaccgggtttgaaattagattgatgtataaacgcattaagttgcttagcaatatgttcatactttaacaatattctgtcctcgtttcactttgtctgtaattattatagcacaaaatattataattgtatcggcgtttacaaattgaaccggtacaattataattggaggtaagtaaatacattttcattctactatcaagttgagggggtaatatttatgagcaataaatataaagaacaagcccaagacattcttacagctgtaggtggtgtcgaaaacattgttgatgcaacgtatgatacgaagtgcattacaattcatatgcaacatacaattccttctacagcaaatgaagtgaaacaaatagttgatgtgacatctgtagcagaaaatgatacgcagttagtcataaaattaaatggaaatgtcgatgaagtgtatcagcaattacagcgattaattaagaatgctaatgtcgaagagagtgagaatactgacaatattaatagtcaagatacaagttatacacctcaagtaaaagtaacaacaccaattttagtgaaagcaccaatcgctggtcgtcgtattttacttaaagaagtaagagattcaatttttagagagaaaatggtaggtgaaggcttagcaatcaaagctcatgaagaatccaaagtaatcgcactgttcaatggtttaatatctatgattgtaccaactaagcatgcagttggtattcaatcagaagacggtgtggacatagtcattcatattggcgtgaatacagttgacttggaaggtaaagggttcaagtgctttgtaaagcaaaatgatcatgttgaagcagggcaaacgttgttgcaattcgaccagcaatatatacaacaacaaggctacaatgctgacgttattgtcgttattagcaactctgccgatttaggaaaagtagaactgacaatgaatgaaatcattacgactgaagatgttatttttaaaatatttaaaaactaggagtgtgttgtaataatgacaaaattaccgcaaaatttcatgtggggtggcgctcttgccgcaaatcaatttgaaggtggatatgataaaggtggtaaagggttaagtgtaattgatgttatgacgagtggtgcacatggcaaagcacgtcagattacagaatctatagatcccaatcactattatccaaatcatgaaggtattgatttttatcatcgttataaggaagatattgccttgtttaaagaaatgggattgaaatgtttacgtacgtcgattgcgtggacacgtatctttccgaatggggatgaagatgtgccaaatgaagaaggactcgccttttatgatcgtatctttgatgaattaattgcacaaggtattgaacctgttgtgacgttatcacattttgagatgccacttcatttagcgaaacattatggtggatttagaaatagagaagttgtcgattattttgtgcattttgcgcgtgttgtatttgaaagatataaagataaagttacatattggatgacgtttaatgaaattaataatcagatggacacatcaaatcctatctttttatggacgaattctggggtagcattgacagaaaatgataatcctgaagaagtcttgtatcaagtagcacatcatgaacttttagccagtgctttagcagttcgtcttggtaaagagattaatccgaagtttaagattggaacaatgatttcacatgtacccatttatccatattcgtgtcatccgaaagatatgatggaagcacaaattgcgaatcgcttacgtttctttttcccggatgtccaagtgagaggttattatccaagctatgctaaaaaaatgttggcacgaaaaggatatgatgttggatggcaagaaggggacgacagtattttacagcagggcacggttgattatattggctttagttattacatgtctacggctgtaaaacatgatgttgatactacagttgaaaacaacatcgtcaacggtggtttgaatcattctgtggagaatccgcatatcgcaacgagtgattggggttgggcgattgatccagatggcttaagatatacattgaatgtgttatatgatcgttatcagttaccactttttattgtggaaaatggttttggtgcagttgatgaagtggtagatggacatattcatgatgattatcgcattgaatatttaaaagcacatattacagcagcgatagaagcagttgatcaagatggtgtagatttaatcggttatacaccgtggggaatcattgatattgtttcatttacaaccggtgaaatgaagaaacgctatggtttaatatatgttgatcgagataatgatggtcatggcacgatggaacgcttgaaaaaagattcgttctattggtatcaacaagtgatagcatcaaatggagataaattataaaggtatattataagtattttagggttagagcccgagacataaattaatatagtaggacctacagtgttataatggcgggcccccaacacaaagaatttcgaaaagaaattctacaggtaatgcaagttggcggggccccaacacagagaaattcgaaaagaaattctacaggtaatgcaagttggggaaggacagaaataaattttgcgaaaatatcatttctgttccaatcccgtgatgttaaaattttaagaaaaaaataatgccactaactatgtatagtgttaatgtttgagtgtttatgaaagtctttaaccaaaattgatgacttactaatcaacgataacgatattgttaagtagatgattagtgtcacaaagaaattaaagtgatagtcaaacatagatacaaagtacagttagtggcattatatttagtgctcttttttagcgacaaaagtaatataattcatatctttacgcaatttagtcatcgttttaaacattttacaaaacattggtcgattttcttttttcaaagcattgttgataatctttatagttccaacaataccttcgtcataaattaaaccttttggtgtcattaaactcattggaccagtatgataatgcacatgattaaaaccagcttgattatataaatctaaccagccaagtttcgtctgcggtgagacattgacattaattgctgcagataatgatttaacaacatgtgtggcatgtgattcattaacgatgacaatatcatgtgttaacaagatacccccaggctttaagactcggtagtactcgcgtaatgctttttcctttatggcgatgggtaacattgttaacattgcttcatttaaaacgatatcgaattgattgtcatcaaagggcaatttaacagcattcgcttgttgaacttgaatatatgattcaagacctgctgctgaaatgttttcctgtgctttttctaatgctttcttatttatatcaacgccttgaatgtgacagccatatgtatgagctagataaatagatgttgtgcacatattacatgccacttctaacacttgtttatcttgtgaaaatgccccttgttgtattaaccaatctgttgcttctttaccaccggggcgtagacgagtttttcctaatttagctaaaaatgtatgaccagcttctttagacatagcataacctccttttaattgataattattatcattaatatagcatatttatatgcgataatttggaagttaaaaagattacaaaaaattgtcacttcatttataactaaacatgagtcaacaagcataggtttagtggaaaattatttctaatagatgatgttttataaagataaaaaagcacagccatgatatacgaatgttgcatgttatatgctaaaccttcatatcatagctgtgtttgattcatttaaacttgatttacttcttctagtagaggaatagatgcttgcgcgccgtgtttttgtacagtgagtgagctcgctttattaccaaaatcaatagcatctgctaagttatcttgcgacttgtttaagcgactgacaaatgcaccaataaatgtgtcgcctgcagcagttgtatcaatcgcatttactttataagcttcgatgtgttggctttgatttttagtagcaaaatatgtaccttgcttacctagcgtaatcaaaacagtcttaatgcctatagataaaaagtaattggcattgtctttcatagattgttcattagttactttaatcccagataacaattcggcttctgtttcgtttggcacaataatatcgattaatgataataattcattaggtaatgctttcgctggtgcaggatttaatactgtcgtcacaccatgtgccttggcaatttcaaatgcagatataatagccgggatgggtacttctaattgtgcaacgacaaagtctgcattgattatagcgtcttttgcgttaataacatcttcaggtgtcatcgtcatattcgcaccaccataaacatagatggtgttttgtccttctgcattcacagtgataaaggcttggcccgtttttgcttcagctgttttgataatatatgatgtatcaatatgagctactttaaaatcttctaagatgaaatcagcaacgccatcagtgccaattttagtaataaatgttgtgtctgcttgcatgcgtgcagtggcaatagcctggttggcacctttacctccgccgaatgctttttgtgcttcttcaacatgtaatgtttcgcctggttgtgcatatctttcaactgttaaaaattgatcgacattcgttgaacctaaaataacaactttgttggtcatgtgtacgctcctttcaagttataacttttaaaaagtaacattcgattctaatgcaatattagagtagggcgttgtttcaccagtacgaatattacctttatttaatgggtgagctaagttacttttcatttcttcgtgaggaatgaaaatgatttcgatttccgatgaaatcaattgtttaatttgttgcaattgtgtagggttatgttcttttatttcttctgctaagtatattttttggatttccatttcttctaacactgtagctaagacatcaataaagcgtggtaagtttttagttacagctaggtcgatacgacgatgatcatttggaattggcatgccagcgtcattaatcgttaataaatcaaaatgaccaattgtcgcgattgcttttgaaatatgttcatttaaaacagctgattttttcatgacatctacactccttattttataaatactgtaacagaagcggctactaaaatgagtactaagccgatgattgtaataaccatttcttttgacgttttatgttgttttaagaaataaataccagttaatgtagcaagcacaacggatgtttgagaaagaataaatccagttgctaaaccattcatattaggttgtgctgaaataagatatgttaaagcaccaaatgcaaagaagaaacctgaaataatttgtaaccacgtaattttattacggaatggattctctgctttcatattcataaagccataaatgactgcaacaattaccatacccattgcttgaggtaaaaaggcagttaggccatcaatagaagttgcttgcggtgcagctgaatataaccagtatccaaattcaccaattaacagaagtaccactgcacgacgtaaatttttggcgttacttgcttctttgcgttcactccaaactgtcatacgcgctccaattagaataacgactaaagctgtaaatccaatgattttatgaccaatgcctggccaatttcctaatgcaaagacaccccataaagatgcgcctaataattggaatgctgttgtgactggcatggcacgagatgagccgactaattcgaacgctttaaatgtaatgatttgtccgaatccccatcctgcacctgataataaggcgaatagcaaattggttccagtagggaagccacttgatgtgactacggctaatataatagcgaagattaacgtacctacagtagcaccgataatttgatgtacaggtttaccaccaaactttgaagcgactgttgggaagaagccccagccaattaaggggcctaacccgataagtaatgcaacaatgctcatgttatacacctcatgatttgtttttagtaaaacgttttaccagtgccatcgtaccatttttatttgtaaaatgcatgcgttttcataaaaactgaaaacgtttaaatcatatttaaaaattcatacattattattttaatttcttagtaaaataattatgattaaaaaccctcagcattaaagcaacgctaagggcctaacaatgatgagtatatttcggaagatacgtagttagtttgaaagatgatagccagttgttgcacgaatttttaaagtcgttggtaattcaatcatatcaatggatttatctaagtgctgtaatcgttgaagtaataaggttaaagatgttttgccaatatcagttataggttgtgccacagtagttaaaggtggcgagacgtacgctgcataatcaatgtcgtcataacctattaatgagatatctttcgggatactgatgccatgttcaattagtcctcgtaaaatgccaatagcgagttcatcgttaatagcgaagattgcagtggcagattgaaccatgatgtcatcaacaatggttagcccaccgcgcttagataattcagtatggacgatttgtggttctggcaattgattcgcgcgcaaagtatcgacaaatccagcgacacgagtcgacatattcgccatcatgtcatatggtgcaacaattatcatatggttgtgaccgagttctattaaatgttgtgctgcaagttgtccaccttgatattcatttgtccgaacaaaatctgtatagccttgatggtcattttgatccagtacgacataaggtacatgatgtttctttagatagttatttagggcgtccggggatgatatgtattgtgcgataattaatccgtcaatacctcgatcaattaaatgtttaatattgtcatacaaatcagttgctgtagatgttaaaaagcataaatcaacatcagatggtttatggtcatgaatactttgcatcagtgctgagaaaaacggatttgttaagctaggcaaaatgacgccaatagtttgaattttactgccgcgcaattgttttgcatgtttattaggggcatagcctaaacgttctgaaacagcatgtacgttttttatcgttgttgcggaaaaacgactatcattatgatttaaaatatgtgacacagttgtaactgatacaccagcttctctagcaacatctttaattgacacttttttcatattatattccttctctttattgtgtaattaatcatacagttatatacccgattattatattcatcatatcatgataaacatttgatgacatatgaagacgtgaatgacttttattgtctacaaacagacgtctgaagtatacgattaaggttgagacgagagaatatattattaaggttaataccttttaatgattatgataacaagaattttaaaatgtttattgtgattaaaaatacaaaagtcattattttaaagaataaaatatttgtttttgaacaaagtattaaaaaacataacgaaatgatgtatattgaactatgtgattgaaaaaatttttaattaaggcttgttaaaacttaagagaggatgtttttaaatgcaattcaaattaaaagaagaagagattattagttttttagaattgaaatatccagaaaaagagttcgaatatggtcgtttgttagttggacaacataaacgtgatgatttagatgtttattactttggtgatacgtttttaatgtgcacgattatttcattcaagacatttgaaattaaagaaacagtagaattatcatatgatgctgttaatcgtattgtgttaaaagatggatggttatttagaaaaatgagaatagaaacaatgcaaaaagtgttaaaatacggtacatctaaattaatgttaactgattttcaaaaagagaattataataaatatattcaaggtcagaaacaacgcgtgatatttgaaaatggccattttgtctaattgatagtgaatataattagagtaagaggctgggacataaatccctaaaaaacagcagtaagataattttcaattagaaaatatcttactgctgttctctatttatacaatacttcgtattgaatggcttcgctttcctagggtgccgtctcagcctcggtcttcgactggcactgctccctcaggagtctcgccattaatactacgtattaacatgtaattttactttgaaatactttaaaaaaataagacactttgcccaacttacactaccaataaaaacttctgttagaattcctcaaaatgatatttcgcgacatgttaatgaaattgttgaaacgatacctgatagcaaattcgatgaattcagacatcatcgtggcgcaacatcctatcatccaaagatgatgttaaaaatcatcttatatgcatatactcaatctgtattttctggtcgtagaatagagaaattacttcatgacagtattcgaatgatgtggttagctcaagatcaaacaccttcttataaaactattaatcgttttagagtgaatcctaatactgatgcgttaattgaatctttatttattcagttcgcttatttttcttggatttcttgtatatcattttaaagtgataaagatatttcgaaacataattcttctattatatttaagatttaactgtttttggaatgatcatgtatgcagacaatgagccaaggatcatcaatacaatgctgactataaatgttacggttgcagctacacttggtgcatagtttagttgtaacatactgaaaactgtagtacttagtgctataccaaaggcgccacctaatgtaccactcattttatataatcctgtagctaaaccaactttttcattaggcatactgaaaattgcaatcgtaagtccaggtgttgcgactaaaccattacctatcgcacatatgacgaaaccaatgataactgcaatgacatattgtgatgccaataattgagtcatgctaataatagtgatgccgatgacagggaacaacggaccaatgatgagcatcaatttgccaccgaaacgtaatgttgctttttcacctaaacgaatcatcgcaactgccacaatggcatatggcaatgtaacaagtccagattgcgcagctgataaaccaaggtgtgtttgagcatatatgaaaaagaccactgttacgcctagaccgctatttaaaacaaagttatttaaaaatgcaccaatgaacggacggttgcgtaatactgagaaatcaataaaaggtacttcatgtcgacgttcgatgatgatgaatatcaacgtagtgatgataaaaatgctcagacaaatgattgaaaatgtactaaaccaaccttgttcgaatccttgtgttaacaataatgtaaagctaccaatcataacagcgaaaatcgacatacctttgtaatcgaatggatgacggtggctatgttgacttactttttcaggtgtgccttttagaagcaatatggcaatgaaagcaatgactatactaatgatgaaattcgtttgccatccgaaatttgaggcaattaaaccgccgataacaccagctaggccgatgccaccaacagtactaatcattagataactaatcgctcgtcttaaatgttctcctttaaattgattatttaacacgccaactgttgaaggtaacaagatagctgctgatagaccttgtaaaattctaccgatgatgagcagtgcagtgatgtccgatataattaatagaagagatgcaaacatactgattatgagacccatgtatgtcattctcagttgtcctattttatcagcaatatcacctgcagccaccatgaagatacctgtggcgaaggaagttaaactaatagataaatttaacacggcaggagaggtttgatacgtttgaccaacgagaggtcctatattaataaatgattgtgcaaacaaccaatatgttaatgcagacaacataatcgcaataataatattactgcgtggtgaagattgtgtgttattcacagatgtcactccttgtaaaaattaaatatagaaagtcatgagatgaagtgaacggatgtatagatgatcgttcactcacacataagtcatgatttccttacatatcataccacagttattgagaatgaatatcaattaattgcttgtataattgattttttatagtatgtttaagtgaaacagctttatttgaaagtgattaaagtaaatgaaggtacagaggagtgagaacaatgtgcacaggattcacaatacaaactttaaataatcaagtacttcttggacgcacgatggattatgattatccattagatggttcgccagcagtgacgcctagaaattatcgttggaaatctcgcactggcacgacaggccaaacgcaatatggctttattggcacaggaacagatatggaaggttttatttatggtgatggtgttaatgaacatggcgttgccatttcaacacaatatttccgaggttatagttcatatggatcaacacacaaagcggacgcgatgaatattacgcaaaatgaaattgtgacatggattttgggatatacaacaagcattgaagatatgaaacaacaagcatcccaaatacatgttgtagctgtatatttaaatgacatcggtgaagttccgccattgcattatcatgtttccgatgcaactggacatacagtcgaagtttcatttaaagagggtgaagtggttataaaagataatcctattggtgtcttaacaaatcatccagacttaaattggcattatagtaatttaagacaatatatcaatatttctccttatccagcaacagcaaatttattggaaggtgtaacgattgaacctttaggcaatgaagcaggtacatttggattgccaggtggatttacttcaactgagcgctttgtgagaatggcatttatgaaagcaaacattgctcaaaacaatgataaagaaatggatttaatgaatgcattttatttattagatgcggtaaatataccgattggaattgtacgtccgcatgatgctgacaatcactatacgatgtatcagaccgtaataaatttaactacaagaacgttatatattaagtattatggcagcaatgaattagtagcattaaagctcacagatgatttaattaatagaaaagatatgacgatttttaagcctgagaagcatatcactattagaaagttgaatgacaatcaatagcgattgataatggaatttggttgatatgatttgatggatgattactatcatgcattagcgttgaatcgcgaacatggacgaacgattagttgttaattttgaaaatttataaaaggttaaacgaatgcagtgagagatgtcattttaatatcaatgtatggctattttgtaatgacaatgtaatgagtttagtaaaacatttcgggaatattaaatagttggaaaatgagaattaaatcctttactcagttgtctaattcttttagtatgtgcagtacagtttaattgaaaactaactttaactttaatggaggatgttttatacatgaaaaaattaacagcagcagcgattgcaacgatgggcttcgctacatttacaatggcgcatcaagcagatgcagcagaaacgacaaacacccaacaagcacatacacaaatgtcaacacaatcacaagacgtatcttatggtacttattatacaattgattctaatggggattatcatcacacacctgatggtaactggaatcaagcaatgtttgataataaagaatatagctatacattcgtagatgctcaaggacatacgcattatttttataactgttatccaaaaaatgcaaatgccaatggaagcggccaaacatatgtgaatccagcaacagcaggagataacaatgactacacagcgagtcaaagccaacagcatattaatcaatatggttatcaatcaaatgtaggtccagacgcgagctattattcacatagtaacaacaaccaagcgtataacagccatgatggtaatggaaaggtcaattatcctaatggcacatctaatcaaaatggtggatcagcaagtaaagcgacagctagtggtcatgcgaaagacgcaagctggttaacaagtcgtaaacaactacaaccatatggacaatatcacggtggtggtgcgcattacggtgtcgactatgcaatgcctgaaaattcaccagtttactcattaactgatggtacagtagtacaagcaggttggagtaactatggtggaggcaatcaagtaacgattaaagaagcgaacagtaataactaccaatggtatatgcataataatcgtttaactgtttcagctggtgataaagtcaaagctggtgaccaaattgcatattcaggtagtacgggtaattcaacagcgcctcacgtacacttccaacgtatgtctggtggcatcggtaatcaatatgcagtagacccaacgtcatacttgcaaagtagataatacagaaaatcccaagttgcgatatcatacgcagcttgggattttttcgttttaataataggtataagtccattgtttgtcctctaaaacatgttgataaaaaggatcttggccaattaacttgatatcatctgcaagtgcttcaacttcatctaaatgatgggtagttaatataattaaacatttagatttcatgatgttaagtagttggtggatgtcatgtctagattttaaatcaataccaactgtcggttcatctaaaatgagaattcgaggttgacctagtaaacctactaatatattaattttacgtttattcccaccggacaatgtagatactttggcagacgtatcatcaaagtttaattgctgtaaatattcgttgatagttgtatcgttaattggatttttacaaagtgatttaaaaaatttaatgttttcagccactgtcatgtgttcaaataacgcaatgtcttgtggcacataaccgatgtgattttgtatttgtctttgattccatttttcgccgaaatagttgatagttccatcattagctttttcaataccagcaatcatacgaagtaatgttgattttccagcaccattatcaccaagtaatacggttaaacgattactatcaaaggacatagttaaatgattgaaaatctgtttgttacggtaacgctttgaaaggttattaatttctatcatcagttacgctcctttacatgaaaataatcaagtatacgatacccatagcaagtgcatatataaatgtcatgaataatcgatgacttattgtttgaatatggaataagataaagacgatacctatctcataaatcaatataagtaacagtgattttaagtaaaatattaagctgagtggttgagacaaatatagactaactgccaatagtaccaacaataacaaaatcgtatgtgtcattacataagtactatatagtttgaaacggcttaaatgatattgtgataatcgttgcaatgctgcttgttggtttaaacgataatgaagtactacttgaacagcgctaacaaataaaatcaccgcaaagattaagctaattgaaatagagtgttgtgcttgtttagtaagcgacacaaatttgattttagattcaggtgtatgtttatgataggacttgttgatagcatcgatggattgatgctgtttcatatcctcaaggtgttcataaataatgttaggaatttgctgctcatataatgaactactaacaatttctacagcaataccacctataaagtcatctctaccatataactgtatcgtttcttttaaacggttctcttttaatttttgagagaaacctttaggaatttgcatacttaaaatagcttcctttttagtaacatcatcttcaatatagctttcatcttcatcgacttttttaatagttacatagtcagattgtttaattttattgacgaatgattttgatgcagtggtttggtctaaatcttgaatggtaatcggtattttgaagttgtcatgtgctacacggtaaccgataccaataagtacgagtgcgatgacaatggttgttacgagcaagatgtattgtaaccattgcttgaacacaacaagttgtatataaggcttcattgacgatacctccaaaccaatacagctaaattaattatcaaaagtgcgatgaagctaagatagaaactagggtgcagttctaaaatgtagttgtttaaaataatttctaacaattgatttgttacaactgcgaacggttgaatattgaaaacaccatttgctatatgttgtaaaaaaatcgtaggtattgttaaaccagataacaccaggatgacaatagctaatatgactttactaatactattcaacaagcctgttgttaaaagttcgatgagtaataaccacagtattaaaaaggtaacataatagcttaaatgaatggctaacgttggccaattatataattcaaagatattcggaatactgaacacaatccaaactacaccaacgatactccataacatagtataaaaccatgtaatcaacgtacgaatgattaataaacgctctttagaaaaatgaaacattttcaatcgcgctttcaatacagtatcttgattcattttcaaaactgtaaataaagatagtgcaaagatgaataccgttgttaaaaatcctgtaattgcataataactgcccgtatcgtataaatgaatcggttctaagttaaatgcacctgaacggtttaatcctgtaatcagcaaatcagtcataacattgatactgtcagaatgtgatgctttcggtgctaagtcttgaaaagctaagatgccacccattgatcgcataagacgttggtaaacagaatctgttagctgagatagcacgacacttttcatggattgttgatcatatgtatatactgaaattggtagttcgccttgtttataaaatgccttggtcatacctttatcaaaaacaaaatagccttgaagtttatgtttttttaacaaagtatgtgcttgcttatcatcatatgctttaatgctcacgttttttcctaggttactccctttaccaatagagtttaagattaatttcgtttcacttgattgatctttatctacgacacctatattaaaatgattgtcatcttctgttacatgttggattgtcgttaatgtaataaggagtgccgctaatataaatagtaaatagataatcaaataccactttttcaataaaaaagagtggtagatgcgaaacaaatgtattgttttcatttaaccactcctccaatgataagattgaaaggcaagatgaccttccaatcttatttttatattttagttatttagatgccttttttaaaattgattcaaacattttgccgccatttttttcgatttctttttcaagtttttcacggtcttttgaagatagactattgaaatcttttgcaccactatcatcaaaatcaatatctgctttcaattttgtgctagattttaaaatgaaattaattggttcttcagcatatttgatgccgatatttaacgtagatttctgagtgttattttttacgtcagaatctatattattttcaaaagtgaattcattttcgtcgctatatttatctaatgcgacagtgattttacctttatcttgacgttttgtgccatctactttttcttggttatctaatttgatttttgattcatcatattctgtctttttaccaaattcgtatttatcattatatttattatctttttctttagaagatacgcctttaattgtatatttcgcttcagcatacgtgtatttatcttgatcgaaatcaagtgcgtaatctagttttaacttatcgtcttctaaagtattagtacctttgattttagttttattattttctttgtctgtaatagtaatttctcgttttacaatcgtatgtttttcggtataaattttagattgaattttagcaaattcatcctttttagtttctttgacatcgtcaattgcttttttgatgtctttttcaaagtcttttgtagcaccttgttcttccattaattttttaaggtctttatcctttttagcttcttctaatacagctaatgtaatttttttagtgtcagctctgctaagtgttaacgtgacaggtctaactttgtacttttcaccattaaccttaatttcttcttttttacctttatcaaaattatcgtcatctaatttgtcgacaataagttcggaatatttttcggcaattttgctgtagtcactttgttgtgcttgagcattattaaaaagagtatttaaatttagttgttggtttgtaataccattttcttttgctgtttcttcatcttcacctgtaagttttgaataagttgataataaatcagaattattaacactatatttccctttaaataatggtgattcgaaataatgcttatctttatctgcagctaactggaatttccctaatgcagagtctgcgattgttggttcaagattaatcattgatttctcttttttaggatcatgtccatatgacattttaattttcgatgcattaacaacagatttaggaatgccaagccctttaacaatttcatctgatgcatctgcgcttaattctaatgaagataaaaacgaattatctttcatcttttcttggaacttcacttcattttcaaaacggtcattaaaataatctttatacatttttgctgtttgttgttcactttttaggtatgtatttttcggtgtattagcaaaaaatgcataaactccccatgcgattccacctattaatagtaagacaataataataggaattataatttttaactttttagacattttgcttcctcccaattatttatgagttaatcatatcagaacaatacattttattaaatggtttattttaaattttgtttaaattaatagaattttagttataataatgtttaataagttattggaaatctaataaactacaaaaaatagtttgattacataatgattcttgaaaaatgttggttaacttaataatatgcatttttttggcgaagaagatttatttaacttataaaaatattgaagtaagattggggagattatgaatttatggaattgaaagtcgatgattttgtaaagaatataaaaagaccatacttgactgtattgggagtatttgtagttgcagtttcattattttttgacgcgattatgtttttctacgctaaactatatgataaattgcctatgtatttactggtgtttatggcctttacagctgtaattttgattatgatgtacatacaagagaaaaatgaaaattacaaagttgaaaaaagatatgtggttagatatctcacgcttaacgttattgtgggatatactttgccattgctttttgtatctatttacgtttttggtgtagtcggttttggatttgatgttttcaattattgtctaggtattatcttgatgttatttatttcttggttaggtttatttttattttataaaaacgaatttgatagtgaaaatcctaatcctgcagttaatgccatagcaattattataaaattatttgcttttggaggaatattttatataagtctaatagttcctgtaacacagcaagaagagatttttatagggttaagtatattcatcaatataattgttgatgctcttcttgttaggtcatattttaattacgcgttatataagagtattaagaaagatatcgaaaatgaaggtaagacaatgtaaaggaaagacataaaaaataataggagtctaaccatgataatttttattttaataacaatatttgctatttattatatagctatgattgctagtttgtttaaaagtgaaggtttttcaataataggtttaatattagatgttgttataatggggacattgattttttactattttataggcgctcgctttgttgatcatgatttaagcaactttttaatgtttatggatactggatcatatatttttatgtactttgcaattaagtgtttatgggtgaaacctaaggtagtaaattatttgattgcaaaagaattgggtgaatctaaagaggtcattgaagagcaggaattagatttacagacatcaaagataagaggtatctactttttcattatttcagtagtgatgttaattatcactaaattaagaatgcaacctgagttacaggcagatgctatatcgatgaatcctgtatttatttttgttggtgttataatcattttaatttggctagtactggatatatatcgcaagaaaaaatacggtatattcttattcaagacgatagtgccactagttgttacgacttggattattatagctacaattatactttcgtaaacgattttgattaatggggaatgtagagaacatttctttgtaattttataatcgaataacatacaaaataaagcgaccaattttgcagtgttacgaattgtaaactgcgaactggtcgctttttattgatgtcatgattaatttaatggatgtaattatatgatgaaacttctgaagcagagatggttcttgatgaaacgatatattcaccaatccagttcatttctgaaattagaatacttccatcaatattaactttttcaacgtaggctacatgaccaaatggaccatttactgtttgtaaaattgatcctcgtgttgggtgtctatctactttgaagccattgcttgaagcttggcctgcccagtttttagcatctccccaaaatgtactaatcgtgtgtccatctttggcacgtttatcaaagacataccatgtacattgtccagcagtatataagttgttcttacttgtgataagaggctgatcaatgattttaccgttacctaatgctaaaggtttaccgtcagcggtctttgctttgtcattaaattcggcgatttgtaattcgtcatacaattcgtctaaatcgatgcctgtaataagccctttgttatcttttgaaaaagcgttatttaattcatcgtcattgtcttcgacattcggtattgctggtgtcaaaggattgcttggtgacgtttgaggcggtgtgtgtgaatcaattgcgtcattaatgtgcgtatactgaccacttaatgaagaatggtactgattgttgttaagatcacgttgatttgcgtgttgatgattgtcgtttgtacgtgactggttttgatgattgttgtttggcgtgttgtttttgtcatatgtataagtatacgcgccggtgtctttattcactttgaactgtgcgtttgggtgtgctttctttgcttcttctaatgttttgctatcattcgtatatgcttgagccgagttaggcgacatactaaataaagtaagagttgtcatcgtcagtaaaattgttttcttcataataaccatttaatcctttatgtatttaatttaattttagtatacacatttatattacaaaaatgaatggttaattaaaaatatatgggtatattcaatatatttatttaaaaaaagctaaaaatacttaaaaaactatatacatatactaataatttatatattatttgagtaaggagcactttttcaaaaaatagtgtccctaaaaagttttgataaacttaaaatattcaggaggtttctagttatggcaatgattaagatgagtccagaggaaatcagagcaaaatcgcaatcttacgggcaaggttcagaccaaatccgtcaaattttatctgatttaacacgtgcacaaggtgaaattgcagcgaactgggaaggtcaagctttcagccgtttcgaagagcaattccaacaacttagtcctaaagtagaaaaatttgcacaattattagaagaaattaaacaacaattgaatagcactgctgatgccgttcaagaacaagaccaacaactttctaataatttcggtttgcaataagcattctgaaattggcaaagtcacattttctaatgtggctttgcttatcatttttttaagaaaacaactgaaaggaaataagcatgaaaaagaaaaattggatttatgcattaattgtcactttaattattataattgccatagttagtatgatattttttgttcaaacaaaatatggagatcaatcagaaaaaggatcccaaagtgtaagtaataaaaataataaaatacatatcgcaattgttaacgaggatcaaccaacgacatataacggtaaaaaagttgagctgggtcaagcatttattaaaaggttagcaaatgagaaaaactataaatttgaaacagtaacaagaaacgttgctgagtctggtttgaaaaatggtggataccaagtcatgattgttatcccagaaaacttttcaaaattggcaatgcaattagacgctaaaacaccatcgaaaatatcgctacagtataaaacagctgtaggacaaaaagaagaagtagctaaaaacacagaaaaagttgtaagtaatgtacttaacgactttaacaaaaacttagtcgaaatttatttaacaagcatcattgataatttacataatgcacaaaaaaatgttggcgctattatgacgcgtgaacatggtgtgaatagtaaattctcgaattacttattaaatccaattaacgacttcccggaattatttacagatacgcttgtaaattcaatttctgcaaacaaagacattacaaaatggttccaaacatacaataaatcattattgagtgcgaattcagatacgttcagagtgaacacagattataatgtttcgactttaattgaaaaacaaaattcattatttgacgagcacaatacagcgatggataaaatgttacaagattataaatcgcaaaaagatagcgtggaacttgataactatatcaatgcattaaaacagatggacagccaaattgatcaacaatcaagtatgcaagatacaggtaaagaagaatataaacaaactgttaaagaaaacttagataaattaagagaaatcattcaatcacaagagtcaccattttcaaaaggtatgattgaagactatcgtaagcaattaacagaatcactgcaagatgagcttgcaaataacaaagacttacaagatgcgctaaatagcattaaaatgaacaatgctcaattcgctgaaaacttagagaaacaacttcatgatgatattgtcaaagaacctgatacagatacaacatttatctataacatgtctaaacaagactttatagctgcaggtttaaatgaggatgaagctaataaatacgaagcaattgtcaaagaagcaaaacgttataaaaatgaatataatttgaaaaaaccgttagcagaacacattaatttaacagattacgataaccaagttgcgcaagacacaagtagtttgattaatgatggtgtcaaagtgcaacgtactgaaacgattaaaagtaatgatattaatcaattaactgttgcaacagatcctcattttaattttgaaggcgacattaaaattaatggtaaaaaatatgacattaaggatcaaagtgttcaactcgatacatctaacaaggaatataaagttgaagtcaatggcgttgctaaattgaaaaaggatgctgagaaagatttcttaaaagataaaacaatgcatttacaattgttatttggacaagcaaatcgtcaagatgaaccaaatgataagaaagcaacgagtgttgtggatgtaacattgaatcataaccttgatggtcgcttatcgaaagatgcattaagccagcaattgagtgcattatctaggtttgatgcgcattataaaatgtacacagatacaaaaggcagagaagataaaccattcgacaacaaacgtttaattgatatgatggttgaccaagttatcaatgacatggaaagtttcaaagacgataaagtagctgtgttacatcaaattgattcaatggaagaaaactcagacaaactgattgatgacattttaaataacaaaaagaatacaacaaaaaataaagaagatatttccaagctgattgatcagttagaaaacgttaaaaagacttttgctgaagagccacaagaaccaaaaattgataaaggcaaaaatgatgaatttaatacgatgtcttcaaatttagataaagaaattagtagaatttctgaaaagagtacgcaattgctatcagatacacaagaatcaaaatcaattgcagattctgttagtggccaattaaatcaagtcgacaataatgtgaataagctacatgcgacaggtcgagcattaggcgtaagagctaacgatttgaatcgtcaaatggctaaaaacgataaagataatgagttgttcgctaaagaatttaaaaaagtattacaaaattctaaagatggcgacagacaaaaccaagcattaaaagcatttatgagtaatccggttcaaaagaaaaacttagaaaatgttttagctaataatggtaatacagacgtgatttcaccgacattattcgtattattgatgtatttactatcaatgattacagcatatattttctatagttatgaacgtgccaaaggacaaatgaatttcattaaagatgattatagtagtaaaaaccatctttggaataatgtcattacgtcaggtgttattggtacaactggtttggtagaagggttaattgtcggtttaattgcaatgaataagttccatgtattagctggctatagagcgaaattcatcttaatggtgattttaactatgatggtcttcgtacttattaatacgtatttactaagacaggtaaaatctatcggtatgttcttaatgattgctgcattgggtctatactttgtagctatgaataatttgaaagcagctggacaaggtgtgactaataaaatttcaccattgtcttatatcgataacatgttcttcaattatttaaatgcagagcatcctataggcttggtgctagtaatattaacagtacttgtgattattggctttgtactgaacatgtttataaaacactttaagaaagagagattaatctaatgttgatgaatagcgtgattgctttaacttttttaacagcatctagcaataatggcggacttaatattgatgtgcaacaagaagaggaaaagcgaatcaataatgatttaaatcaatatgatacaacgctatttaataaagacagcaaagcggttaatgatgcgattgctaagcagaaaaaagaacgacaacaacaaataaaaaatgatatgtttcaaaatcaagcgagtcactcgactcgcttgaatgaaactaaaaaagtgttattttccaaatctaacttagaaaagacttcggagagtgataaaagcccctatattcaaaacaagcaggagaaaaaaatattcccgtacattttgatgtctgtaggggcttttttgactttaggatttgtcattttttcaattcataaagggagacgaacgaaaaatgaatcagcacgtaaaagtaacatttgattttactaattataattacggcacatatgacttagcagtaccagcatatttaccgataaaaaacttaatagctttagtattggatagtttggacatttcaatatttgatgtcaatacacaaattaaagtgatgacgaaaggtcaattacttgttgaaaatgatcgactcattgattatcaaatcgctgatggagatattttgaagttactataggaggaaaaatagatggttaaaaatcataaccctaaaaatgaaatgcaagatatgttaacgcctttagatgctgaagaagcagctaaaacaaaattacgcttagatatgagagagattcctaagtcttcaattaaaccagaacattttcatttaatgtacttattagaacaacattctccatattttatagatgctgaattaactgaactacgtgacagtttccaaatacattatgacattaatgacaatcatacaccttttgataatattaaatcatttactaaaaatgaaaaattacgttacttactcaatatcaaaaatttagaagaagtaaatcgtacacgctacacatttgtgttggcaccagatgaattatttttcacaagagatggattacccattgctaaaacaagagggttacaaaatgttgttgatccattacctgtgtcagaagctgaatttttaacaagatataaagcgctggttatctgtgcattcaatgagaaacaatcatttgatgctttagttgaaggaaacttagaactacataaaggaacgccatttgaaactaaagttattgaagcggcaacgttagatttactaacggcatttttagatgaacagtatcagaaacaagaacaagattatagtcaaaattatgcatatgtacgcaaagtaggacataccgttttcaaatgggttgctatcggtatgacaacgttaagtgttttattaattgcattcttagcctttttatatttttcagtaatgaagcataatgagcgcattgaaaaaggataccaagcatttgtaaaggatgattatacgcaagtactaaatacgtatgatgatttagatggtaaaaaattagataaagaggcactttacatttatgccaaaagttatatccaaacaaataaacaaggtttagaaaaagataagaaagaaaatttacttaataatgtgacaccaaattcaaacaaagactacttattatattggatggaattaggacaaggacatcttgatgaagcgattaatattgccacttatttagatgataacgatattacaaagttagcgttgattaataaattaaatgagattaaaaataacggagatttatcgaatgataaacgttctgaagaaacgaaaaagtataacgataaattgcaagatattttagacaaagaaaaacaagttaaagatgaaaaagcgaaatctgaagaagagaaagcaaaagcgaaagatgagaaattaaagcaacaagaagagaacgaaaagaaacaaaaagaacaagcacaaaaagataaagaaaaacgccaagaagctgaaagaaaaaaatagtataggactgaggcaaagacaatgcataaattgattataaaatataacaaacaattgaagatgctcaatttgcgagatggtaagacatatactattagcgaagacgagcgtgcagatattacgttgaaatcgttaggcgaagtcattcatttagaacaaaataatcaaggtacttggcaagcgaatcatacttctattaataaggtgcttgttagaaaaggtgaccttgatgacattacattacagctttatacagaagctgattatgcatcatttgcgtatccttcaattcaagatacgatgacaattggaccaaatgcgtatgatgatatggttattcaaagcttgatgaatgccatcattattaaagattttcaatcaatacaagaatcacaatacgtacgcattgtgcacgataaaaatacagatgtgtatattaactatgaactacaagagcaactaacgaacaaagcttacattggtgatcatatttatgttgaagggatatggctcgaagtacaagctgatggtttaaatgtattgagtcagaatacagtggcatcgtcattaattcgcttaacacaagagatgccacatgcacaggcagatgattacaatacgtaccatcgttcgccaaggattattcaccgtgaaccgacggatgatattaagattgaaagaccgccacagccaatacagaagaacaatacagtgatatggcgttccattataccgccattagtaatgattgctttaactgttgtcatctttttagtgagaccaattggtatttatattttaatgatgattggtatgagtacagtaacgatagtatttggtattacaacgtatttctctgaaaagaaaaagtataacaaagatgttgaaaaacgagagaaagattacaaagcttatttggataataaatctaaagaaattaacaaagcgattaaagcacaacgttttagtttgaattaccattatccaacggttgctgaaattaaagatatcgttgaaacgaaagcaccaagaatatatgaaaaaacatcgcatcatcacgatttcttacattataagttaggtattgcgaatgtagaaaagtcattcaaattagattaccaagaagaagaatttaaccaacgtcgtgatgaactattcgacgatgctaaagaattgtatgaattttacacagatgtagaacaagcaccattaatcaatgatttaaatcatgggccaattgcatatattggtgcacgacatctcattttagaagaattggagaaaatgctaattcaattgtcaacattccatagttatcatgatttagagtttctatttgtgacacgtgaagatgaagttgaaacattgaaatgggcacgttggttgccacatatgacattgagagggcaaaacattagaggatttgtttacaatcaacgaacgcgtgaccaaattttaacgtcaatttatagcatgattaaagaacgtatccaagctgtgcgtgaacgcagcagaagtaatgagcaaattattttcacaccgcaattagtgtttgtcattacagatatgtcattaattattgatcatgtcattttagaatatgtaaaccaagatttatcagaatatggtatttcattaatctttgttgaagatgtgattgaaagtttgccagagcatgtagataccattattgatatcaagtctcgtactgaaggcgaactgattacgaaagaaaaagaattagttcaattgaaatttacacctgaaaatattgataacgtcgataaagaatatatcgcgcgacgtttggcgaatttgatacacgtcgaacatttgaaaaatgcaattcctgatagtattacatttttagagatgtataacgtgaaagaagtagatcagcttgatgtggttaatcgatggagacaaaacgaaacatacaaaacgatggcagtacctttaggtgtaagaggtaaagatgatattttatcattgaacttacatgaaaaagcacacgggccacatggtttagttgctggtaccactggttcagggaaatctgagattatccaatcatacattttatctttagctattaattttcaccctcatgaagttgcattcctattgattgactataaaggtgggggtatggcgaacttatttaaagatttagtccatttagttggtacgattacaaacttagatggcgatgaagcgatgcgtgccttaacatcaatcaaagccgaattgagaaaacgtcaacgtttattcggagagcatgatgttaaccatattaatcaataccataagttatttaaagaaggtattgcgacagaaccaatgccacatttattcattatttccgatgagtttgccgaattaaaatcagaacaacctgattttatgaaagaacttgtatcaacggcacgtattggacgttcgttaggtattcatttaatacttgcgacacaaaaaccatcgggtgttgttgatgaccaaatttggtctaactctaaatttaagttggcattaaaagtacaagatagacaagacagtaatgaaattttaaaaacaccagatgcagcagacattacattaccaggtcgtgcgtatttacaagttggtaataatgaaatttatgaattattccaatctgcatggagtggtgcaacatatgacatcgaaggcgataaattagaagttgaagataagacgatttacatgattaatgactatggtcaacttcaagcaatcaacaaagacttgagtggacttgaagatgaagaaacgaaagaaaatcaaactgagttagaagcggtcatagatcatatcgaatctattacaacacgattagaaatcgaagaagttaagcgtccatggctaccaccattgccagaaaatgtatatcaagaagatttagtagaaacagatttcagaaaattatggtcagatgatgcaaaagaagtggaattaacattaggacttaaagacgtaccagaagaacaatatcaaggaccgatggtattgcaattgaaaaaagctgggcacatcgcgttaatcggaagtccaggatatggtagaacaacgttcttacacaacattattttcgatgttgcaagacaccatcgtcctgatcaagcacacatgtacttgttcgatttcggtaccaatggtttgatgccagttacagacataccacatgtcgctgattactttacagtagatcaagaagacaagattgctaaggcgatacgtatatttaatgatgaaattgatcgtcgtaagaagattttaagtcagtatcgtgtcactagtatttctgaatatcgaaaattaactggtgaaacaattccgcatgtctttattcttattgataactttgacgcagtaaaagattcacctttccaagaagtttttgaaaatatgatgattaaaatgacgcgtgaagggctagcattagacatgcaagtaaccttaactgcttcaagagctaacgctatgaaaacaccaatgtacattaatatgaaaacgcgtatcgcaatgtttttatatgataaatcagaggtgtcgaacgtagtaggacagcaaaaatttgcggttaaagatgttgtgggtcgagcattgttaagtagtgatgacaacgtatcattccatattggccaaccatttaaacatgatgagaccaaatcatataatgatcaaattaatgatgaagtatcggcgatgacagaattttataaaggtgaaacaccaaatgatattcctatgatgccagatgaaattaaatatgaagattacagagaatcattaaacttaccagatatagttgcaaatggtgctttaccaattggattagattatgaaggtgttacactacaaaaaattaaattaactgaaccagcaatgatttcatcagaaaatccgagagaaattgcgcatattgctgaaattatgatgaaagaaattgacatattaaatgaaaaatatgcgatttgtatcgcagactcaagtggagagtttaaagcttataggcatcaagtggctaactttgccgaagaaagagaagacattaaagcgattcatcaactaatgattgaagacttaaagcaaagagaaatggacggcccatttgaaaaagattcactttatattatcaatgattttaaaacatttattgattgcacgtatattccggaagatgatgttaaaaagcttattacaaaaggaccagaacttggcttgaacattttatttgtcggcattcataaagaattaatagatgcttatgataaacagattgatgttgcacgtaaaatgattaaccaatttagtataggtattcgtatttcagaccaacaattctttaaatttagatttattcaacgagaacctgttattaaagaaaatgaagcatatatggtcgcaaaccaagcttatcaaaagattagatggtttaaatagcaatgaattaaataggagggaggtatgttatgaattttaatgatattgaaacaatggttaagtcgaaatttaaagatattaaaaagcatgctgaagagattgcgcatgaaattgaagttcgttctggatatttaagaaaagctgaacaatataagcgattagaatttaatttgagttttgcactagatgatattgaaagcacagcaaaggacgtacaaactgcaaaatctagtgctaataaggacagtgtaactgttaagggaaaggcgcccaatacgttatatattgaaaaaagaaatttgatgaaacaaaagcttgaaatgttgggtgaagatatcgataaaaataaagaatccctccaaaaagctaaggaaattgctggcgaaaaggcaagtgaatattttaataaagcaatgaattaatattgaggtgaagatatgggtggatataaaggtattaaagcagatggtggcaaggttgatcaagcgaaacaattagcggcaaaaacagctaaagatattgaagcatgtcaaaagcaaacgcaacagctcgctgagtatatcgaaggtagtgattgggaaggacagttcgccaataaggtgaaagatgtgttactcattatggcaaagtttcaagaagaattagtacaaccgatggctgaccatcaaaaagcaattgataacttaagtcaaaatctagcgaaatacgatacattatcaattaagcaagggcttgatagggtgaacccatgatgaaagatgttaagcgaatagattatttttcttacgaagaattaacaattttaggtggtagtaaattgcctctcgtaaattttgaattgtttgatccatcaaattttgaagaagctaaagctgctttaattgaaaaggaattagtaacagagaatgacaagttaactgatgcaggttttaaagtggctacattagtcagagagtatattagcgccattgtaaatattcgaattaatgatatgtattttgcaccatttagctatgaaaaagatgaatatattttgttaagccggtttaaaaataatgggtttcaaatacgaattatcaataaagacattgcatggtggtcgattgtacaatcatatcctttattgatgagacaagaaaagtccaatgattgggactttaaacaaattgacgatgaaacattggagaacttaaataatgaaagtatcgatacgattgggcgtgttttagaaattgaaatatacaatcatcaaggtgaccctcaacaaagtttatataacatttatgaacaaaatgatttgttattcattcgatacccattaaaagataaagtgctgaatgttcatattggtgtcattaatacatttatacgagaattatttggattcgatactgatgaaaatcatattaataaagcagaggagtaatgacgttgagtggaaaaattagtgttaaagctgaaacgattgcacatgttgtaaaagaattggaaagcataagtcaaaagtatgatgaaatagctcaaaactttggaaaaatagcgcaattaaattactacagtagtgaaaaagctgcacattctatggaaaatggctatagtagtgctgcaacagtcattagtggtctcaaaggtccattgagtacactcggtggtggcgtcatgaattcagcacaaaagttctttgaagcagatgaacattggggtacggaatttgccaagctttactataatattgagggataggtgcatgacatgacaaaagatattgaatatctaacagctgattatgacaatgaaaagtcatctatccaaagtgtaatagatgcaatagagggtcaagacttcttagatgtagatacaacaatggatgatgcggtaagcgatgtcagttctttagacgaagatggcgcaatatcattaacaagtagtgtagtaggtccacaaggatctaaattaatggggtattatcaaaatgagttatatgattatgcatctcaattagattcgaaaatgaaagaaattattgacacgccatttatagaagatatagataaagcattcaaaggtataacgaatgttaaattggaaaatatactaattaaaaatggtggtggacatggtagagatacctatggggcttctgggaaaattgcaaagggagatgccaagaaaagtgacagcgatgtttatagcatcgatgaaatattaaaatcggatcaagaatttgtaaaagtaattgatcagcattacaaagaaatgaaaaaagaagataagaaattatctaaaagtgattttgaaaaaatgatgactcagggcgcttcttgtgattacatgacagtagctgaagcggaagagctagaggagcaaaagaaaaaagaagaagctatagagattgcagcactagctggtatggtagttttatcttgtattaatcctgttgctggagcagtagctattggtgcttattccgcttattcagcagcaaatgcagccacaggaaaaaatattgtaactggaagaaagctatctaaagaagaacgaatcatggaaggactttcgcttattccattgccaggtatgggcttcctcaaaggtgctgggaaaagtttaatgaaattaggcttcaaaggcggagaaaaatttgcagttaaaacaggattgcaaaagacaatgcaacaagcagttagtcgtatttcacctaaaatgggaatgatgaaaaacagtgtgttgaatcaatctcgtaactttgctcaaaatactcatgttggacaaatgctgagtaacatgcgtggtcaagcaactcatactgttcaacaaagtagaaattggattggacaacaagcacaaaatgtcaaacgaatagtgaataatggacttgataaagaaatagcacatccatttaaacaacaacttgcaccagcgggaatgggtggtataaaatttgctgaaacaactactttgagaaacatgggtcaaaacataaagcgtgctgttacaccacaaaatcacgtgacacatggtccaaaagatagtatggtgagaagtgaaggcaaacatagtataagtagccatgaaatgaattcatcaaagtatgttgaatcaccaaactacaccaaggttgaattcggagaacactatgcaagacttagacctaagaaactaaaggcgaatattgaatacacaacacctactggtcacatatatcgaaccgatcataaaggtcgcataaaagaagtttatgtagacaatctctctctaaaagatggggatcgtaatagccatgcacaaagaactgtggggggagaggatagattaccagacgatgatggaggtcacttaatcgctagaatgtttggtggttcaaaagacattgataaccttgtggcacaaagtaaatttatcaaccgtccatttaaggagaaaggtcattggtataatcttgagaaagagtggcaagagttcttaaactctgggaaagaggtgaaaaatattaaaatggaagtaaaatatagcggtaatagtcaaagaccgactatatttaaagttgaatatgaaattaatggtgaaagaaatattagaagaatattaaataagtagaggtgccaacatgacatttgaagagaagcttagcaaaatatacaatgaaattgcgaatgagattagcagtatgataccggtagagtgggaaaaagtatatacaatggcttatatagatgatggaggaggtgaagtattctttaattatactaaaccaggtagtgatgacttgaattattacaccaatatacctaaggagtataacatttctgtgcaagtatttgatgatttatggatggatttatatgatttatttgaggagttaagagatttatttaaagaagaagatttagaaccatggacatcatgcgaatttgattttacaagagaaggtgaattaaaagtttcatttgattatattgattggataaattcagaatttggtcaaataggtcgacaaaattactataagtatagaaaatttggaattttaccagaaacggaatatgaaattaataaagttaaagaaatcgagcaatatattaaagagctagaagaataaactatcttaatgtaagactaaacaataaagctttgtttagtctttttagcgtttaagtaaaaagcaatagataccgtaaagttgatgctcatcaaataataatataaagataattttaggtttttaaacttttaatcgaaaagaatctaagtttatagctttaaatacgtaatatgctatttaaaaaataatgtataggagatagatatgactactaaagaaaatattgatactcttcgaaagccaggcgcacaagccttaagtttaatatcattgtttttgatacttttttcatgtttgactttcttttttggtttagattatgaaaggtttccaaattatttaaagataacgacaattatagaattaataattattgtaattagtttacttcaatggattagatttatagatttcgaaaaagaaagtgcacagaaatataaaaaaatatatgctcgatttttagttgttataaatgtgttaactactatcactgtagtatttgcactgtgtaatctttattgttttgcagctgtacaaaaccattatgatttatttaattattggttgatgggttcgatttcaatcataattagctatttattattagtaattggcggaatgttcacgttattaaaattacctaaagtaacaaaacgttggggtggtaaaactaaaacacatttcggtttattattaactgcgttgagctcatttatatatattgaaaaaattatcgaatatatattggttcctaatgtcgtagaatctaagtttataattattgtgagcatgttggttatcgctggagcacaatttgtggcatttcaatttattatgcaatacagtagattctatatttttgaattaaacactgaagatgatgactaaacaattttataaattctgtgaagtatacttatatataagataatcaacttcaacgtatatcaccatattattttatactcaatgatgtgaatggatttaagtggattgatattaaagtaaaagttatggaatattgaggtgtgaatatggagttcttattattaattgtcgtagccggactgtattatattatatatttaactgctgtgatgtattctgaaaaaatagtagtattgcctataatcatctatgccattgtgtttgtaataattggtatcacttatatctttataggcgacagctatgatcaattaacaaatttcaatgtgattttgtatatggggagtttgttttatgcatggatggctattagaaatctttggaacagaccactattactaaaatataagaacattacagatagttcaagtggaatagttaataaatctgaatacaattcagttgaaagcttacgtataaatattgaaatagctaagtataaagggattatttctttgatagtagctatagtactaacggtattaatgacattaaagtcaacacctcaaatcactgcagaaacacgtgacttaagtatctcatttttcatactcagcttatttatcattattatatttgcagtttgggatttgtttattagagttagaaaaggagcgtttgcttttgttgtaataaggccaatattatttagttgttggttatttattttgaatatgattttatcaagattattataattgtattacatataggtgtgggtaaatttttatttattaaatgataaaaaagtatatactattaatatcttttttactataattataaatagttaaataaattgaaagacaaaataatgagtaggagttaatgagatggaaaaccaaaaacaaggcaatggcttaaaaattgcaacatgggtatttattgtattaacagtagttacaccgctatttggtattggaagtattgtttgtagtattaattataaaaaatacgatgctgaaaaaggttcgaagttattgcaaattgcaattatcgtaacaataattgcttttgttttaaatttattagcatatttaggtttaagataagtaaaacgaatttgaagaagcattaagcgacatttgggtgttgtttaatgctttttatttaacggaaataagtgtagagaataaattaatagtttaatcaagagatatttcgaacacataggggcgataacatgactttcgaagaaaaattaagtgaaatgtatagcgagattgcgaataagattagcagcatgataccggtagagtgggaaaaggtatatgcaatggcatatatagatgacggaggaggagaagtgttctactattacacagaacctggaagtaatgaattatactactatactagtgtattaaataaatatgatatatcggaatcggaatttatggattcagtgtatgagttgtataaacaatttcaaaatttaaggaatttatttaaagaagaaggacatgaaccatggacatcatgcgaatttgactttacaagagaaggtgaattaaaagtttcatttgattatattgattggataaattcagaatttggtcaagtaggtcgacaaaattactataagtatagaaaatttggaattttaccagaaacggaatatgaaattaataaagttaaagaaatcgagcaatatgttaaagagcaagaagaagctgaacaatagaggcgataacatgaatttcgaagaaaaattaagtgaaatgtacaataaaattgcaaatgagatcaatgaaatgataccagtagagtgggaaaaggtatatgtaattgcatatgtggacgatggaggtgggcaagttatattttattataccaagcccagaaatgatgagctgtattattattcgagtatcgttgaagattataatgttttagaagaaatctttgatgatttatggatggaactttatagatcatttaaaaaattaagaaatatatttaaagaagaaagtcttgaaccatggacatcatgtgaatttgactttacaaaagaagataaattaaaagtttcatttgattatattgattggaagaatacagaatttgatcaattaggccaagaaaactactataactatagaaaattcggaattataccagaaatggaatatgaaatggaagaggttaaagaaatcgagcaatatattaaagagcaagaagaagctgaacaatagaggcgataacatgattttcgaagaaaaactaaatgaaatgtacaacgagattgcgaataaaattagtagcatgataccagtagaatgggaaaaggtatatacaatggcttatatagatgatggaggaggtgaagtattctttaattatactaaacagcgatgaattgaattattacaccgatatacctaaggagtataacatttctgtgcaagtatttgatgatttatggatggatttatatgatttgtttgaggaattaagaaatttatttaaagaagaaggactagaaccatggacatcatgcgaatttgattttacaagagaaggtaaattaaaagtttcatttgattatattgattggataaattcagaatttggtcaagtaggtcgacaaaattactataagtatagaaaatttggaattttaccagaaacggaatatgaaattaataaagttaaagaaatcgagcaatatattaaagagcaagaagaagctgaactataggggcgataatatgactttcgaagaaaaattaagtgaaatgtatagcgagattgcgaataagattattagcatgataccggtagagtgggaaaaagtatatgcaatggcatatatcgatgaagaatgtggagaagtgttttacaattatactgaaccaagcagtgatgaattattttactatacaagtgtgataaagaagtataatttattgaaatcaagctttatggattcagtatatgagttgcatgatcaatttgaggaactaagagaagtatttatagaagaaggtcttgaaccatggacatcatgcgaatttgattttacaaaagaagataaattaaaagtttcatttgattatattgattggataaatacagagtttgatcaattaggccgtgaaaattattatatgtacaaaaaatttggtgttttaccagaaacggaatatgaaatggaggaggttaaagaaatcgagcaatatattaaagagcaagaagaatagacaatcttaatgtaagattaaacaataaagctttgtttagtctttttagcgtttaagtaaaaaacaatagagaccataaagttgtcatcaaataataatataaagataattttaggcttttatacttttaatcgaaaagaatctaagtacttataactttaaatacttaatatgctattacaaaatcaatgtataggagataggtaaatatgactactaaggaaaatatagacattcttcgaaagccaggtgcacaagccttaagtttagcatcattatttatgatacttttttcatgtctaactttcttttttggtttagattatgaaaggtttccaaattatttaaagataacgacaattatagaattaataattatcataattagtttacttcaatggattagatttatagatttcgaaaaggaaagcgcacagaaatataagaaaatatatgcccgatttttagttattataaatgtgctaactactatcaccgcagtatttgcaacatgtaacctttattattttgttgctgtacaaaatcattatgacctattcaattattggttgatgggtacgatttcaatcataattagttatttgttattagtaattggcggaatgttcacgttattaaaattacctaaagtaacaaaacgttggggtggtaaaactaaaacacatttcggtttattattaaccgcgttgagcgcatttatatatattgaaagaattatcgaatatatattggtgcccaatgtcgtagaatccaagtttgtcataatggtaagtatcattattattgcttgtacacaatttgtggcatttcaatttattatgcaatacagtagattctatatttttgaattaaacactgaagatgatgactaaataattttataaaatactgttggagtatacttaaataagaaaatcaacttcaacgtatatcaccatattattttatactcaatgatgtgaaagaatttgagtggattgatattaatgggatttgattattagaattagaaaaggaacgtttgcttttgttgtaataaatctattatttttcaattgttggttatttattctgaatataattttatcaagattattataattgtattacatataggtgctggtaaattttatttacgaaatggcaaaaaagtatatactattaatatcttttttactataattataaatagttaaataaatagaaagacaaaataatgagtaggagttttagggctattatttacaaataatataatactgcaaagactcgaaattatttagaattccagttatcgtaacaatagttgcagttattttagttccattagtgtatttaggtttaaaatgagtaatattaatttgaagaagcattaagcgacgtagaggtgttgtttagtgctttttatttaacggaaatgaaaccaatatctattttgaaaatataggggcgataacatgactttcgaagaaaaactaagtgaaatatacaacaagattgcgaatgagattagtgggatgataccagtagaatgggaccaagtatttacgatagcttatgtaaatgatagaggtggagagatcgtttttaattatactaaaccaggtagcgatgaattgaattattacacatatatccctagagagtataatgtctctgaaaaagtattttatgatttgtggacggatttatatagattgtttaagaagttaagaaacgcatttaaagaagaagagcttgaaccatggacatcatgcgaatttgactttacaagagatggcaaattgaatgtatcttttgattatattgattgggtgaattcagaatttggaccaatgggaagagaacattattatatgtataaaaaatttggaatttggcctgaaaaagaatatgccataaattgggttgaaaaaataaaagattatgttaaagagcaagatgaagctgaactataggggagataatatgactttcgaaggaaaactaagtcaaatgtacaacgagattgcgaatgagattagtgggatgataccggtagaatgggagcaagtatttacaatagcttatgtaactgatcaagctggagaagtcatctttaattatactaaaccagatagtgatgaattaaattattattcagacatacctaaagattgcaatgtctcaaaagatatttttaagaattcatggtttaaagtttatcgaatgtttgatgagttaagagaaacttttaaagaagaagggcttgaaccatggacatcatgcgaatttgactttacaagagatggcaaattgaatgtatcttttgattatatagattggataaatacagagtttgatcaattgggccgtcaaaattattatatgtacaaaaaatttggggttataccagaaatggaatatgaaatggaagaagttaaagaaatcgaacaatatattaaagagcaagaagaagctgaacaatagaggtgataacatgactttcgaagagaaaataagcaaattatataatgagattgcgaatgagattagcagtatgataccggtagagtgggaaaaagtatatacaatggcttatatagatgatggaggaggtgaagtattctttaattatactaaaccaggtagtgatgacttgaattattacaccgatatacctaaggagtataacatctctgtgcaagtatttgatgatttatggatggatttatatgatttgtttgaggaattaagagatttatttaaagaagaaggacttgaaccatggacatcatgtgaatttgactttacaagcgaaggtaaattaaaagtttcatttgattatatagattggataaatacagagtttgatcaattaggccgtgaaaattattatatgtataaaaaatttggggttttaccagaaatggaatatgaaatggaagaaattaaagaaatcgatcaatatattaaagagcaagatgaagctgaaatataggggagataacatgactttcgaagaaaagctaagtcaaatgtacaatgaaattgcaaatgaaatcagtggaatgataccagtagaatgggaaaaagtatatacaattgcctacgtagatgatgaaggtggagaggttgtttttaattatactaaaccaggaagtgaagatttgaattattattcagatattcctaaagattgcaatgtctcaaaagatatttttaagaattcatggtttaaagtttatcgaatgtttgatgagttaagagaaacttttaaaaaagaagatttagaaccgtggacatcatgtgaatttgactttacaagaaagggaaatttaaaagtatcatttgattatatagattggattaaattaggttttggcccatcaggaaaggaaaactactatatgtacaaaaaatttggtattttaccagatatggaatatgaaatggaagaaattcgagcagtagagaagtatgttaaagagcaagagtagcagacatgttataaaagactgtgcaaaatcaccctcgttttacatttgattcaaagaagaaggtaaaagataagattatttgcaacttaaaaagtcaattagcttatcggtatccatacatcatggataaatgagttcaactaattaacaaatcacgatataaatttaaaattgtcattaattgaaaaggttattgtagtgtattttataaagttgatgtacatcgacttattttttaaaacttatatcaaaaaaatatgagaaaagtatatactattaaaatgttttttactataattataaatagttaaatatttgggaattaaataaatatataggaggcaatttttagagatacatagcaatgtaaaggtatcaaatagttatttcataatttattatgatgacataattttcagtagatagttgtaaattaacactgaaatagatgtttatattaagaagactttaatatcataattaatcaaaatcttgcgtcaaacatttaaacgaattttaagttgataacaattggcaaaacattgttcaaacatcacaatgataaagcatattatcagtattgtagtgtgtggaaaatgacagccatctaaggagaaaaatgatgaaaagaatattggtagtatttttaatgttagcaattatattggcaggttgttctaataaaggtgaaaagtatcaaaaagatattgataaagtgtacaaagaacagaatcaaatgaataaaattgcctcgaaagtacaaaacactattaaaacagacattaaacaagaagacagtaatacacatgtttataaagatggtaaagtcattgttattggtattcaattatataaagatcgtgaaaaaatgtattatttcgcatatgaaataaaagatggtaaggcagagattaatagagaaatagacccaattaagtatatgaaagaccataaagcagattatgaagatgaaaatgtagaagtggaaaaagattaacataggctttctttaaaacttttaaccagtttcaaaaagtaaatgagctttagcgacaataatttttaaaataaacacgatataaatttaaacatttatatataagaacacaaacgcaagtttgtaaataataataataaaggagtaagacaatggaaaaatcgatcaaaataatgacaataataggaattgttgttcagggtttagcaacggtatttagtttactattgatggttttagcagcatcaggtgtaatgactacagatgtgtcaacaacagttaatggtgaggttgacccagttgatgcagaaacagcagcagcaattttcactgtattattcttatccctattcatatttggaatcatttcaattattttaggtgcaatcggtatgtttaaagcatctaaaaacaaaaaaatgagtggtatattgttgattattggagctgtaataagtggtaacataattacatttgctttatggttaatcagtggtattaaactacttactaataacaagcctaaagatgaaataagcgacttatcataaacatcgtatattgaaatttcaagatttcttaagtaattaaataaagtgctctcttagaagtagattttcagtcaataactgcttttaagagagcattttgtatttgataatgctcatagcatcggataaaaatcattgacgaactttaaaaaaatacgttagacaatgcacttctaaatattaaaggcatcgactaacgcattgttcaaatatagttaattatttttataaaattgatgatgatcattcaagtaagcatagaataaacctataatgagtccgcctccaatatagttaccgataaaagccgcagcgatattcgaaatagctggtatgaagtgcaatgtatcaacttgataaattaaaccacccataaataagcaactgttgtaaacgacgtgttcataacccataaaggcgaatatggtaacaccgaacatcatgacaaacatttttgcgagtacatcgtcaatttgcatggcaataactaatgaaatattgataaagaaattggcgaagatcgctttcattaatatacttacaaaaccagtagacaacgttttatgctctataactgctgataactgatttaacatatctggcgtcattacatttgaaaaacgcatgaaactaaataaaatagcagcacctaaaatatttcctgcaaagcataataaaaatattttcaatactctagttggtttaattactttataatacaggcctacagtaaagtacatgaagttactggttagtagttcggagtttgtaaataaaatgagtactaacgcaaagctgaatgtaatggcactggccatattcacaatgcctggcggtaaatctggttcgtgtgttgctttaactgataatacgaagaccgtaataatcccgataataaatcctgccatcatcgcgcgtaataaataacgttttaaataaacgctttgtaatatatcttttgttcttatcgtttcgactacgttatttacccagtcgtccccataaaaaatcttatcccatttaatatgtttctccttcacaatgacatcctcacttttcatttgttaatcagagtatactatgaattgccttatttgtgaataatttcacaaaattaattttaaaaactaatatttttgaataacagctaggattttttaacaaatcatttattttaaaataatcaatagacagacggtatcactgaaaagtcatgaatttcatataaaaaagcctagtaacgatgggtcaatcattactaggcagtgagcatttattaagttgtcgcttgtttcggacggcgtataaatacatcgattatgaaaccgataatagcaaagagcatgaatggtacaagccaagctaaatcgatatctgctaaaggtaacatcataaacgatttcaaaataacaccgtgtaataagttgaaactatttagtatttgtaaaattgaaataatcaatgtaataacagttgcgagtcgataggcccaactgaatctgaatgtgctaaacatgttagcaaatgatatgagtacaagtgcaatcgacacgggatatattaaagtcaataatgggacagcaatttttaaaatcatttctaaaccaagtgttgtaaataagaaccctatgatagagaaaataagtgcgaatattttataagaaaacttaggtacgtgtttcttagtaaatgtggcgcaagcattgacgagtcctatacatgttgttaggcatgcaaggataaccgtcattccaaatacgaggttaccgaacgaaccaaataatcgtaatgagttgtacgtcaatatatctgtaccatctttaaagtttcctggagctgttgatgccccaacgtatgcaagtgcaaagtaaatcattccaagtaatatggctgcaataagacctgaaaagcagacatattttaaaattttcatgcgatctgtgaggcctttaaacttatagccattgacaatgactacggaaaaagctaacgcagcaacaagatccattgtaaaatagccttccaaacttcctgaaatgaaaggatgtgttatatatttatccttaggtgcacttagtgcagattcagggttgaaaatgacagcaatacttaatagagcgaccattaatagtaataacggtgttaataatttacctaaattatcaacgattttcgatggatttaaactaatccagtaaacgatggcaaaaaagattgctgcgaatataattaaagtccattggttatgcacaggtaaaatgtgtcttgtaccaatttcgtacgcgacatttgcagcacgtggaataccgtaaaatgctccgatagacatgtaaatcacgacagcaaaaataaacccgaaccatggatgtatacgattgcctacactttcaacaccttcatcataaaatgcaacaacaataacagtaataaaggggagtaatatgcctgtaagggcaaagcctagcataccaatccacatattttgacccgctgtatggccaagcatgggcgggaatattaaatttccggctccaaaaaatagtgaaaataacatgaggcccgaaataataacttgttttttcaatgtaatttccttcctaaaactagatattcataataatttaaaaaatctgaaaaataaaaacgttcttactttatctttaaatgacaatactatgattctattattttataaaaaagattgcaataataacgtcttgctattattggataatgacaattaaagtgtcgtttttatgaattaaaataggtgaaagtaagttggaaatacgttggagcgttgtgatttttatgagaaattgtatgagtgaggactgctatttataaaaggtaaactatggatgagtttatggttgttccaataggtaaataagagatagcacactgtacacataatgatacgtggatgagtgaatatgtctgataggaaggcctagtcactcaaatgaatttaagtttattacgtgataaatcacaaatctctctcatgtgataggtctcccattaaatcatgcttatatgaaatgttcacatatttgttagcttttcaagaaataatattaaatatcttttcatagtatagcaatattaaataaatgcatttataattttaactgtattttaaatattaatcatgaggtgataagatgaataaaatttcaaagtatattgcaatagcatcattatcggtagcggttacagtttcagcaccacaaacgacaaattctacagcgtttgccaaaagttctgctgaagttcaacaaacgcaacaagcttctataccagcatcacaaaaggcgaatcttggtaatcaaaatattatggcagtggcttggtatcaaaattcagctgaagcaaaagcattatatttacaaggttataacagtgcaaagacacagttagataaagagattaaaaagaataaaggtaaacataagttagctattgctttggatttagatgaaacagttttagataattctccatatcaaggctatgcatcaatacataataaacctttcccagaaggttggcatgaatgggtacaagctgctaaagctaaacctgtctatggcgcaaaagaattcttgaaatatgctgacaaaaaaggtgtcgatatctactatatttctgatagagataaagaaaaagatttaaaggcaacacaaaagaacttaaaacaacaaggtatccctcaagctaagaagagtcatattttactaaaaggtaaagatgataagagtaaagaatcacgcagacaaatggttcaaaaggatcataaacttgtcatgctatttggagataatttattagactttacagatccaaaagaagctacagctgaatctcgtgaagcattaattgaaaaacataaagacgatttcggtaagaaatatatcattttccctaacccaatgtatggtagttgggaagctacgatttacaacaataactataaagcaagtgacaaagcaaaagataaattacgtaaaaatgctattaagcaattcgatcctaaaacaggcgaagttaaataatatatgaattggacgtctacatgtacttaaaggtatatgtaggcgtttttaaattgatccttaattttaaatgtaccgtacaaaaataatagacaattaattgcattttccataaatttgcttttaatataaaaagttcgggtataatgaaggataagtgtatgtataacattacagagcgcaacacgacgtacgtgcatctaagaatataaacaatgtttaaatcatagtagtagggagagaaatgcatgtttttagcttggaatgaaatacggcgcaacaaattgaagtttggactaattattggtgtgttaacgatgattagttacttgctatttttattatctggattggcgaatggtcttatcaatatgaataaagaaggcattgataagtggcaagcagatgccattgttctaaataaagatgccaatcaaactgtgcaacaatctgtttttaacaagaaagatattgaaaataaatacaagaagcaagctactttgaagcaaacaggggaaattgtgtctaatggccatcaaaaagacaatgttttagtgttcggtgttgaaaagtcatcatttttagttccgagtttaatagaagggcataaagcgactaaagataatgaagtgttagctgatgaaacgcttaaaaataaaggatttaaaattggtgacacattatcactatctcaatcagatgaaaaattgcatatcgtaggttttacagaaagtgcaaaatataatgcgtcatcagtcattttcacgaatgacgctaccattgccaagatcaatcctagattgactggagataaaattaatgcagttgttgtacgtgatacaaattggaaagacaaaaaattaaaccaagagcttgaagcggtaagtattaatgactttattgaaaatttaccaggttataaaccacagaacttaacattaaactttatgatttcattcttatttgtcatttcagctacagttataggcattttcctatatgtcatgacattacaaaagacgagtttatttggcatattaaaagctcaaggatttacgaatggctatttggcgaatgtggtaatttcgcagacggtcatattagcactatttggtacggcatttggcttactgttaacaggcgttacaggtgcatttttacctgatgcagtacctgtcaaattcgatgtactaacattgctcgtatttgcaattgtgttaatgattgtctctgtattaggaagtttattctccattttaacaattagaaaaatagatccgttaaaggcgattgggtaggaggtgtagcaaatgttgaaatttgaaaatgtaacaaagtcatttaaagatgggaatcgtaacattgaagcggttaaagatacaaattttgagataaataaaggtgatattatagcattggttggaccttctggctctggtaaaagtacatttctaactatggcaggtgctttacaaacaccgacatctgggcacattttaatcaataaccaagatattacgacaatgaagcaaaaagcattggcaaaagttagaatgtctgaaataggttttattttacaagctacaaaccttgtaccatttttaacggtaaagcaacaatttacattattgaaaaagaaaaataagaatgttatgtctaatgaagactatcagcaacttatgtcacaattaggtctaacttcattgcttaataagttaccttcagaaatttcaggtggtcagaaacaacgtgtggcgatagccaaagcgttatatacgaatccgtcgattattttagcggatgaacctaccgcggcgttagatactgaaaatgcgattgaagtcattaaaattctacgtgatcaagccaaacaaagaaagaaagcatgtattattgttacacatgatgaacgacttaaagcatattgtgatcgttcatatcatatgaaagatggcgtccttaatcttgaaaatgaaacagtagaatagttttattaagccggtacatcatgtgccggtatttttatgtttatgtattatttgaataaactttcacattcaattaataataattattatcgaaaatcagaaatattccgtgaaatataatattttttgtagtaaaatggcctctaagtattcaatatttaaatatggggattgaatataaaattatcgtaatgggggtcaatggttatggatttattgataggtactttatttttatttttggtcttagtgatttttacattatttacatataaagcgcctaatggtatgcgtgccatgggagcattagctaatgcagcaatcgcaacatttttagtggaagcatttaataaatatgttggtggcgaagtattcggtattaaatttttagaagagctaggagacgctgcgggaggtctaggtggtgtcgctgccgctggattaacagcattagctatcggtgtgtcaccagtatatgcattagttatagcagccgcgtgcggtggtatggatttattaccaggtttctttgcgggttatatgattggatatgtgatgaaatatacagagaaatatgtgccggatggtgtcgacttaattggatcgattgtcatcttagcgccattagctcgtcttattgcagtattattaacgccagtagtgaatagtacattgattcgaattggtgatattatccaaagtagtacgaatacgaatccaattatcatgggtatcattttaggtggtattattacggttgtcggcacagcgccattgagttcaatggcattgacagcattattaggtttaacgggtgtacctatggctattggtgccatggcagcatttagttcggcatttatgaatgggacgctattccatcgcttaaaattaggtgatcgtaagtctacgattgcagtaagtattgaacctttatcacaagcagatattgtatcagccaatccaattccaatctatattacaaatttctttggtggtgcgattgctggtttaattattgctatgtcaggtttaattaacgatgcgacaggtacagctacaccgattgcaggatttttagttatgtttggatttaatcatccgacgacaattgtgatttatggtgtagtaatggcgattgtaggtgcgcttgcaggttatcttggttcaattgtatttaaaaaatatccaattgttactaagcaagacatgattaatcgaggtgcagtagacgcatagcatcatcatattgaatagtaaaaacaaataaaacatagtaacgtgattcagtcgatgtaacagtcgataatgagtcacgtttttttatagaaaaatacaagacataaaaatgtcataatttattgtcgacaaatatcatactgtataaacatttatcattttctcaagtaccttttacacgatggaatgaacttactttttacgaaattatgcgtattttataaacaaatatcattgatataacggtaaatgtaagcgtttacaacagaaataacagcatgctacgatatttttgtaaattcactgattcaagtattttaagtcaatatgaggagggatgttatgagcgattctgagaaagaaattttaaaaagaattaaagataatccgtttatttcacaacgtgaacttgctgaggcaattggattatctagacccagcgtagcaaacattatttcaggattaatacaaaaggaatatgttatgggaaaggcatatgttttaaatgaagattatcctattgtttgtattggcgcagcgaatgtagatcgtaagttttatgtgcataaaaatttagttgcagaaacatcaaatcctgtaacgtcaacacgctctattggtggcgtagcaagaaatattgctgagaacttaggtaggcttggcgaaacggtcgcttttttatctgctagtggacaagatagtgaatgggaaatgattaaacgattgtccacaccatttatgaatttggatcatgttcaacaatttgaaaatgcgagtacaggttcatatacagctttaattagtaaagaaggcgacatgacatatggcttagcagatatggaagtgtttgactacattacgcctgaatttttaattaagcgttcacacttattgaaaaaggctaagtgcattattgtagatttgaatttaggcaaagaggcattaaacttcttatgtgcctataccacgaaacatcaaatcaaattagttatcaccacggtttcttccccaaaaatgaaaaatatgcctgattcattacatgctattgattggattatcacgaataaagatgaaacagaaacatacttaaatttaaaaatagaatctactgatgatttaaaaatagctgctaaacgctggaatgatttaggtgttaaaaatgttattgtgacaaatggcgtgaaagaactcatttatcgaagtggtgaggaagaaatcattaagtcagttatgccatcaaatagtgtgaaagatgttacaggtgcaggcgattcattctgtgctgcagtagtgtatagctggttaaatgggatgtctactgaagatatattaattgctggtatggttaacgcaaagaaaacgatagaaacgaaatatacagttaggcaaaacctagatcaacagcaactttatcacgatatggaggattataaaaatggcaaatttacaaaagtatattgagtattctcgagaagttcagcaagcacgggagaacaatcaaccgattgtagcattagaatcaacaattatttcgcatggtatgccgtacccacaaaatgttgaaatggcaacaacagtagagcaaattatcaggaataatggtgccattccagcaaccatagccattatagatggcaaaattaaaattggtttagaaagcgaagatttagaaatactggcaactagtaaagacgttgctaaagtatctagaagggatttagcagaagttattgcgatgaagtgtgttggtgctactactgtagcgacgacgatgatatgtgctgcaatggctggtattcaattttttgttacaggaggtattgggggcgtccataaaggtgcagaacatacgatggacatttcagcagacttagaagaactgtctaaaacaaatgtcactgttatctgtgcaggtgccaaatcaattttagacttacctaagacgatggagtatttagaaacaaaaggcgttccagttattggatatcaaacgaatgaattgccagcattcttcactcgcgaaagcggtgttaagttaacaagttcggttgaaacgccagaacgacttgctgacattcatttaacaaaacagcagttaaatcttgaaggtggcattgttgttgctaatccaattccatatgagcatgccttatcaaaagcatatattgaggcaatcataaatgaagctgttgttgaagcggaaaatcaaggtattaaaggtaaggacgccacaccgttcttgttagggaaaattgtagaaaaaacgaatggtaaaagtttagcagcaaatataaaacttgttgaaaacaatgcggcgttgggtgctaaaattgctgtcgctgttaataaattattgtaggtgatgatacatgaatattttattcgctatcacagggatagcatttgcactatttgttgcgtttttattcagttttgatcgtaaaaaaatagacttcaaaaagacgttaataatgatatttattcaagtgttgatcgtgttatttatgatgaacacaacgattggtttgacaattttaactgcactaggttcattttttgaagggctaataaatattagtaaagcaggcataaattttgtttttggagatatacaaaataaaaatggctttacgttctttttaaacgtattactgccattagtttttatttctgtattaataggcatctttaattatattaaggtattaccatttattatcaaatatgtaggtatcgctattaataaaataactagaatggggcgcttagaaagttattttgctatttcaacagcaatgtttgggcaaccagaagtatatttaacaataaaagatattattccaagattatctagagcgaaattatatacaattgcgacgtctggtatgagtgctgttagtatggcaatgctaggttcatatatgcagatgattgaacccaagttcgtagttacagcagtaatgttaaatatttttagtgcgcttatcatcgccagtgtaatcaatccctataaatctgatgatactgatgttgaaattgataacttaacgaaatccacagaaactaaaacattgaatggaaaaacaggaaaacctaagaaagttgcctttttccaaatgattggtgatagtgcgatggatgggtttaaaatcgctgttgtagtagccgtaatgttgttagcatttatttcattaatggaagcaattaatatcatgtttggtagtgttggtttgaactttaaacagcttattggctatgtgtttgcaccaatcgcattcttaatggggattccatggagcgaagctgttccagctggctctttaatggcgactaaattaattacaaatgagtttgtagcaatgcttgattttaaaaatgtcctgggtgatgtatcagctcgaacacaaggtatcatttcagtttacttagtaagcttcgctaattttggtacggttggtatcatcgtaggttcaattaaaggcattagtgataaacaaggagaaaaagttgcatcctttgcaatgaggttgctacttggttcaactctagcttcaatcatttcaggatcaatcattggcttagtattgtaaatgaatcgaagtacctaaattaaattcatggcaaagctaaaccccgtcaccaagttggcgcaacagcgcatcataacttagtgacggggttttatcataacaatctactttttcgtagccgtttttgaaatgtatgttgatggtttatctttttcaaaaattgttaatcccgttatatcttttttatgttttgaagggacaatgaagctaagtatataagcaaagacaaaagcaactgtaaatgaaatggtagatacatagaaaggtgagttacctttgccaacaccattatagacataagcaaagatgatacccaatattaatccacaaataacaccgaatgtattcgtacgtttagtgaaaataccaactgcaaatacaccagccaatggaacgccgaataatccagtcacaaacaagaataaatcccataagtcatttgaattagaagcaattaagtatagtgacattccaaaaccgaaaatacctgcaatgataataatgaaacgtgcaaagttaacttcgtgtcgctcgctaccttttccgaagaagcgttgcttaatgtcgattgaaatacaagcagatatagaatttaaactagatgaaatggtagactgtgcagcggcgaaaatggctgcaataagtaatcctgctacaaatggtggcatctcagtcaaaatgaaatatggcactacagatgatgtattgaagccttttggtaaaacagcttcatgtgtataaaatgaatacagcattgtacccataccataaaataagggtgctgaaattaaagctaggataccatttgtccataacgatttatttgtttcttttaaactatcagaagcttgataacgctgcacgacgtcttgactcgctgtgtattgatacaagttgttgaaaatatttcctaggaaaataattggaatggcagctgccgcagtatttagtttccaattgtctgcactaattaattttttgtgctcaatcgcatctgcaaagacagtgccgaaaccgcctttaatgttcacaacacctagaataataataactaaagcgccgcctaataaaatgacgccttgaatgaaatcactccaaaccacaccttcgaaaccacctaaaaatgtatataaaatacatagtaaaccaacgagtgatgcaacgatataagggttcatgtctgatacagatgtgattgctaatgttggtaagtagataacaattgcaacacgccctaaatggtaaacgacaaataataatgagccaatgacacgtatgctagggccaaatctagcttctaaatattcatatgcagatgttacctttaactttttaaagaaagggacatagaaataaataagtaatggaataattgcgacgatagcaatgttaccagcgatatatgaccaatctgttaaaaatgctttctctggtgtcgacataaatgtaatcgcacttaacgtagtagcataaattgaaaagccaactacccaagatggcaagcgaccacttgcggtaaagaaactattggtactttggctcgcgcgcttggtaaaataaacgccaatgaacaacatagctagtagataaatgataacggcaacccagtttagtgtgccaaatccaacttctttcatgggcaacatcccctttacaatgtattgattctttgatgtctataaatcgtattttgcaatgagttgatctaatgtttgtcgatgtgcttcgttaaaaggtttgaaaggtcttttcggtaatcctgcatcaatgccacgatgacgtaatatttctttcaatgttggataaatccccattgataacactgtttcgataatgtcgtttgaatcatgttgcagttggtaagcttcttgaatttgaccttgtcgtgctaagtcgaagatttttcttgcacggcgaccattaacgttatatgtagaaccaattgcaccatctacgccagaaatcgtagcttgaactaacatttcatcaaagccagataagattaatttgtctgggaatgcttttctaatacgttcgagtaggaagaagtttggcgctgtatatttaacaccaacaattttttcatgattaaatagctcgctgaattgttcaatagaaatattcacacctgttaaatctggtattgcataaataatcatattgttctgagttgcttcgataatatcgaaatagtaatctctaatttcttcaaaagtaaatggatagtagaatggtgttacggcagaaagtgcatcataaccgagttctgtggcatattttccaagttcaatggcttcatttaaatctaacgaacctacttgagcaatcaatttcactttatccccaactgcctctttggcaaccttgaaaacttgcttcttctgctctgtatttaataaaaagttttcgcctgagctaccatttacataaagaccgtctaattcttcagtttcaatggcattttgagcaatttgtttaagtccttgttcatttacttgaccattttcatcaaaaggaacgagtaacgctgcatataaaccttttaaatctttgttcattatgaagtccctccaaaaatcatttgataatatagtttacagctataattgtaaacgctatcataaaatgtaacaatatctttttgaaaattgtagtcatatttatgtataattaatgaaaatgtttttcaaaatcaatagaaatggagtgagtaaggtgtattacatcgcaatcgatattggaggcactcaaattaaatcggcagttattgataagcaattgaatatgtttgactatcaacaaatatcaacgccggacaacaaaagtgagcttattactgacaaagtatatgagattgtaacaggatatatgaagcaatatcagttgatccaacctgtcataggtatttcatcagcaggcgttgttgatgaacaaaaaggcgaaattgtatacgcagggccaaccattccgaattataaaggtactaattttaagcgattattaaaatcactgtctccttatgtcaaagtaaaaaatgatgtaaacgctgcattactaggcgaattgaaattacatcaatatcaagcagaacggatcttttgtatgacgcttggtacaggcattgggggtgcgtacaagaataatcaaggtcatattgataatggtgagcttcataaggcaaatgaagttgggtatttattgtatcgtccaactgaaaatacaacgtttgagcaacgtgctgcaacgagtgcattgaaaaagcgcatgattgccggaggatttacgagaagcacacatgtgccagtattgtttgaagcagctgaagaaggtgatgatattgcaaaacaaatattgaatgagtgggcagaagatgtagcagaagggattgcccaaatacaggtcatgtatgatccagggcttatattaattgggggcggtatatctgaacaaggagataatctcattaaatatatcgagccgaaagttgcacactatttaccaaaagactatgtttatgcaccaatacaaacgactaagagtaaaaatgatgcagcattatatggctgtttgcaatgatagttgaaagaaggagtcattctaaaatagaatttgaaaccgttacgagagatgagagctgttgttagttccacacatcacactctatctaggaccaatctaaactatatcaaccaacagtgtgccacgggcaaattaaattgaagaagctgagatattaaaattttagaaaatgtaaaaaaatatttggtattgaaattaaaaaagcacctagcaactcgttgggacaatcacgatgattgtctacagttgcaggtggatttgaatatactactagttatttgttgtctaggataatagatttagtatgttgataagtttgactcagattcgtattttctaataaatgataactcacgatatcgattaaaaagagtgtcgcaatttgtgtgttgataaattgatggtcggtattacgcgattgatccgttgttaaaagtactaaatctgcacaatctgtaagtttactaccttcaaaatttgtgatggcaacgacatatgcaccatgagatttggcgacttccgctgcagaaattaattccgaagtattaccactatttgacatagcaataaacatatccgaatgagatagtagggatgccgatattttcattaaatgtgaatcggtagtaacattaccttttagccccatacgaatcatacgataataaaattcagtcgctgataaaccagagctacctagtccagcaaagagtatatgtcgacttgattgaagtttgtcgataaaggtttggataatgtcgttatcaataaattcaccagtttgttgaatgatttgttgatgatatttatgaattctttgaataattgggctattttcaataactgtctctgtcatttcttgttgaatattaaattttaaatcttggaaattctcataatccagcttatgactaaagcgtgtcatcgttgctggtgatgtaccaatcgcatgggctaaggagttaatcgttgaaaaggcatcgctataaccattttgtcttatataattgacgatgcgtttatcagtttttgtaaataaatgttgataacgttgaacacgattctcaaatttcattgtgtcaccccttcatcttaatgattactattatatatgaaaaatattttcaagatagtaaaaagcattgataaaaattatcttaatgatatattgtaaatgactttacgtgaaaaaacgacttatggagtgaggaataatgttaccacatggattaatagtatcttgtcaggcactaccagatgaaccattgcattcatcttttattatgtcgaaaatggcattagctgcgtatgaaggtggtgctgttggtattcgcgcaaatactaaggaagacattttagcaattaaagaaacggtagatttaccagttattggcattgtgaaacgtgactatgatcactcagatgttttcattactgcaacgtcaaaagaagttgatgaactgatagaaagccaatgtgaagtcattgcattggatgcaacgttacagcaacgtccgaaagaaacgttagacgaattagtatcatatattagaacacatgcaccgaacgttgaaatcatggctgatatcgcgaccgttgaagaagctaaaaatgccgcacgacttggctttgattatattggcacgacgttacatggctatactagttatacgcaaggacaattactttatcaaaatgacttccaatttttaaaagatgtactacaaagtgttgatgcaaaagttattgcggaaggtaatgtcattacaccggatatgtataaacgtgtgatggacttaggcgttcattgttcagtcgttggtggtgcgataacacgaccaaaagaaattacgaaacgttttgttcaaattatggaagattaaatgataacgataaaaaaacgagatgaccatcattaattaaaggcacctaattatcttaggtggctgaatgaatgtaatgggttcatctcgttttgtttgtttatgatagtgattttattttcaactttatccaaaaataagtaaagcgacggggatggtgattaatagcgacaacgccacgcgtaaaaaccaaatgatgatgagtttccagacaggtattttaatttcagttgctagtatacatggcactaatgctgagaaaaagataatggctgatacgcttactacaccgacgacaaatttagtactcattgcagctttagttactaacaaagatggtagaaacatctctacaatagaaatcgctgacgcttttgctagtaaagcctgatcagcaattgggaaaatataaataaatggatagaagatatagccaagccaatcaatgaatggtgtatagttcgctacaatcagtcctaaaaaaccaatcgataatatagaaggtaaaataccaacagtcatttctaaaccgtctttcaaattgtcccaaacgttcttcacgagagatggtgttaatgcattttgtttcatcgcctctgcatatgcagttttcagtctgcttccttcaatagcaacttcttgttctccttcttgtccgttataatattctgttgattcattgctgattggcggtagccatgcagtaattgcagtcacgacaaatgtgatgactaaagttatccaaaagtataaattccaatgcggcattaatcctaaagttttagcaacgataatcataaaagttgctgaaactgttgaaaagccagtcgcaataatcgtggcttctcgtttgttgtacatcccttgcttatagacacgattagtaatcaataatcctaaggaataactgccaacaaacgaagccactgcatcgacagcggattttcctggtgttttaaaaataggtctcataataggctccatataaacaccgacaaattctaataagccatagcccactaataaagaaagcgcaattgcacctactggaattaagatacttaatggcatcattaatttttcaaacaaaaacggaccatagttagctttaaatagtattgatggaccgattttaaatacatacattataccgatcattgcacctgcaactttaaataatgtaatgaccaagtttgtgattgaagtcataaaagtacgtctcactattggtaacgctgtaccaattaaaatcataatcagtgcaacatagggcataagtggacctatgattgagcgaatggctagatgaacatgatcgacgaaaatagtgttgttaccattaatcgtaaaaggaataaagaaacatagtatgcccactaaactatagacaaaaaaacgccatgcacttggttgttgtgcattagaatgatattgattcattaaagcaacccctttgtttaaatgaatacacaaaactgtatgatgcatcttccccttaatgagatgaatcattattttaatttagaaaaatctgaaaacttactataattgtatagtttgaattattttcataccaatacaaattaactaattatatatagattgaaactatattacttaataaaatatttatcttaaatgttgttgtgttgattcaacaccacaactaaaagtgtttataaattatttggaaatacacatatttgtaaatgattagtatcgatttaatatcgtattattaaatttttattaattttgtagtcttaatcaaaaaataatatatgtcatgttatattgaaggtgcagttgtttttcattctcaagagggggtcaaaaaaatacttttgaggtgattatatgttaagaggacaagaagaaagaaagtatagtattagaaagtattcaataggcgtggtgtcagtgttagcggctacaatgtttgttgtgtcatcacatgaagcacaagcctcggaaaaaacatcaactaatgcagcggcacaaaaagaaacactaaatcaaccgggagaacaagggaatgcgataacgtcacatcaaatgcagtcaggaaagcaattagacgatatgcataaagagaatggtaaaagtggaacagtgacagaaggtaaagatacgcttcaatcatcgaagcatcaatcaacacaaaatagtaaaacaatcagaacgcaaaatgataatcaagtaaagcaagattctgaacgacaaggttctaaacagtcacaccaaaataatgcgactaataatactgaacgtcaaaatgatcaggttcaaaatacccatcatgctgaacgtaatggatcacaatcgacaacgtcacaatcgaatgatgttgataaatcacaaccatccattccggcacaaaaggtaatacccaatcatgataaagcagcaccaacttcaactacacccccgtctaatgataaaactgcacctaaatcaacaaaagcacaagatgcaaccacggacaaacatccaaatcaacaagatacacatcaacctgcgcatcaaatcatagatgcaaagcaagatgatactgttcgccaaagtgaacagaaaccacaagttggcgatttaagtaaacatatcgatggtcaaaattccccagagaaaccgacagataaaaatactgataataaacaactaatcaaagatgcgcttcaagcgcctaaaacacgttcgactacaaatgcagcagcagatgctaaaaaggttcgaccacttaaagcgaatcaagtacaaccacttaacaaatatccagttgtttttgtacatggatttttaggattagtaggcgataatgcacctgctttatatccaaattattggggtggaaataaatttaaagttatcgaagaattgagaaagcaaggctataatgtacatcaagcaagtgtaagtgcatttggtagtaactatgatcgcgctgtagaactttattattacattaaaggtggtcgcgtagattatggcgcagcacatgcagctaaatacggacatgagcgctatggtaagacttataaaggaatcatgcctaattgggaacctggtaaaaaggtacatcttgtagggcatagtatgggtggtcaaacaattcgtttaatggaagagtttttaagaaatggtaacaaagaagaaattgcctatcataaagcgcatggtggagaaatatcaccattattcactggtggtcataacaatatggttgcatcaatcacaacattagcaacaccacataatggttcacaagcagctgataagtttggaaatacagaagctgttagaaaaatcatgttcgctttaaatcgatttatgggtaacaagtattcgaatatcgatttaggattaacgcaatggggctttaaacaattaccaaatgagagttacattgactatataaaacgcgttagtaaaagcaaaatttggacatcagacgacaatgctgcctatgatttaacgttagatggctctgcaaaattgaacaacatgacaagtatgaatcctaatattacgtatacgacttatacaggtgtatcatctcatactggtccattaggttatgaaaatcctgatttaggtacatttttcttaatggctacaacgagtagaattattggtcatgatgcaagagaagaatggcgtaaaaatgatggtgtcgtaccagtgatttcgtcattacatccgtccaatcaaccatttgttaatgttacgaatgatgaacctgccacacgcagaggtatctggcaagttaaaccaatcatacaaggatgggatcatgtcgattttatcggtgtggacttcctggatttcaaacgtaaaggtgcagaacttgccaacttctatacaggtattataaatgacttgttgcgtgttgaagcgactgaaagtaaaggaacacaattgaaagcaagttaaattcatcttctgaatttaatatgctatgtaaatcgtgctgttatcacggcacatcagatataagtagcatcacagtgttgaatttaaaaatagtgaagtgaaataaagcgcctgtctcattagcgaaaactaaagggacaggcgtatctgtttatgagcttaataaattgtatgaataatatggttgatcgaataactgtttatcatgatgataaattgagttttttaaaataatgatatattacatcattgttatagcgtttaagaaatcaacaactttacgataaatagtgattgcttcgtcattaggtctacgatcaaaatcatgctcgtttttattcacgcgttcaaatgttgaatgtggaacatgattcatgatatgttcgctttcctcaacgggaacatcataatcgccattacaatgcgcaatgaaaacaggtggaagtgttttaagttcatctggtgcaatattatattttgaattagtataatcagcaatgttaatcatatttatccatttacctgtgccacgtgcataaacgtagattaaaaaacgttgtgcgatttgatcttgaacaaccggtgttggtgaagtgagttgtgcaatcattgtttcgtttacgctttgagctatttttgcgtaataactattagttgttttaaaaggttcagtgttgatgcgactataaccataaaaatcaataacaccatcaatatctctgtctcgtgcaattaatagacttaaatatgcacctgatgatctgccaaaggtaaaaatagggcaattagaatattgtgattgaatcgcatcgaatgatgcgtagacatcctcaataatgcaatcgagacttacttctggtaataaacgataacttagttgaattaaatcgtaatgttccgtaaggatatcgatatactgtggggataaatcgttagctttaccgaacattaatccaccaccgtggatgtagacaatagcgccttttgttggttgattttttgctttaataattgtgtaaggtaatgcaaatgcatctttagtaattactttatctttaatttcagtcacgatttaataggctccttatttttgatattgatgtcattataacactgtcttaaatttccatgaaaaatagtcttaagacgatgagtcatgataattctgttccaattgacgtaaagcgtcacgggtatgcttctttagaccttccccataatccatcattttaacaatatctttaaaagcagcatgtggaatggctaaatcttctaaatctgccatagaaaattcaagattgatatcatgtggtcgctgttcagcaagtttatgcacaaagtcaggttctgtgacaaaaggcgaagacatgccgaccatatctgcatgttgtaaagcatctaaagcagactctggagaattaatcccgccacttgcaattaaagggatacgacctgctaaatgttcatagacaatttggttaactggtcgaccgaaatgatcacctggtgtacgagacgtattttgataaatatgtcgaccccagctagcgattgctaagtattggatgtttgaaacgtccatgacccaattgattaattggttgaactcgtcaatggtatatcctaaatcactgcctctggtttcttctggcgttgctcgaaatcctaaaataaaattgtcaggtgcttctttatcaatcacttcttgtaccgcacgcataacttctaaacataatcttgcacgattttttaatgagtcggcaccgtaatggtctgtacgtttattcgaaaaagttgagaaaaatgtttgaatcagcaaacgttgtgcaatcgaaatttccacaccatcaaaacctgctttaatcgcgcgtaatgtagcatcgcgatactgctgaatgatgctattgattttctcatgagacatggcgataacatcgtgttcaatcggtgaatgcaatgtcatagggcttggtccatacacctttccaaaatttaaaatggcttgatttgaaaaacgaccagcatgcgctagctggataatagcgaggctaccatgttgtttcatcgtagatgccatgttagttaatccagggatacaagcatcatgatcaatattaaagccatattcaaacaattgaccataaggttcaatgtaagcagcgccggtgacttgcattccagctgaattagagcgacgtgcagcataagccaagtcttcttttgtaatatagccttcttttgttgatgtgtttacggtcattggtgataatacaaagcgattcgaaattttgatgccattaggtaagtggattgattgtaaaagtggtttgtatcggtacatactatgattccttttctattcaatattgttttcaaagtaccatggaaagaatgaataatcaatgatgaacagtcttgatagaatagaattggtacatggaaagtatttttaaaattaaactaatgaatggcatttgtaggtctgaaaatatgaatatgaaaaagaaaaataaaggcgaaaagatataaaagttaattgaaaaacgttatcatatacgtgggtatatgaagagggaatggtattaagaacgctaaaatgttatgtcggtttgacatgacaggataagtttggagatgacggattggttaaattaagcgtattagactatgccttaatagatgaaggtaaggatgcacaaaaggcattgcaagattcagtgacacttgcaaaattagcagatcgacttggctttaagcgaatttggtttacggaacatcataatgtaccagcgtttgcgtgtagtagtccagaacttttgatgatgcatacattggcgcagacaaatcacatacgagttggctctggtggtgtgatgctgccgcactatcgaccttataaaattgctgagcattttagaatgatggcagcgttatatccaaatcgtattgatttaggtattggtaataatccaggtactactatggtaaagcaagctttagatggaataaatcctacatatgatagttacgatgaatcgatttcgttattacgtgattatcttacaataaaggataaaccaagtgcgcatacgttaggtgtccaaccacacattgatcattttccagaaatgtggttattaagtagtagcgcaacatctgccaaaatagctgccgaactaggtatagggctttctgttggaacatttttgctaccagatataaatgcgatacatgcagcgaaggataacattgatatttacaaaaaacatttccaagcatcaacgattaaaatggacgcaaaggtgatggcatctgtatttgtcattgtagctgataacgaagcggaagtagcagcattacaacatgccttagatgtttggttattaggtaaattacaatttgcagaatttgaagattttccttcagtagacacagcacaaaagtataagcttaatgatcgagacaaagagatgattcaagcacatcaagcacgcatcattgcaggtacacaagaaaaggttaaagcacaattagatgatttcattgctacgtttgaagttgatgaggtgttagtagcaccgcttattccaggtattgaacagcgttgtaaaacattaaaattactcgcggaaatttatttgtagcattttaaatagaagagaaaggatgaagataagatgaaaaagttagccaattatttatgggtagaaaaagtaggagatttgtatgtgtttagtatgacacctgaattgcaagatgatattgggacagtaggttatgttgaattcgtaagtccagatgaagttaaagtggatgatgaaattgtgagtatcgaagcatcgaaaacggtcattgatgtgcaaacgccattgtcaggaacgattattgagcgaaatacaaaagcggaagaagaaccgacaattttaaactctgaaaaaccagaagaaaattggttgttcaaattggatgatgtcgataaagaagcattcctagcattaccggaggcttaaatggaaacgttaaaatcaaataaagcgagacttgaatatttaatcaatgatatgcatcgagagagaaatgacaatgacgtattggtaatgccatcttcatttgaagatttgtgggaattatatcgaggcttagcaaatgtcagaccggcattacctgtaagtgatgaatatttagctgtacaagatgctatgttaagtgatttgaatcgtcaacatgttacggatttgaaggatttgaagccgataaaaggtgacaatatctttgtttggcaaggtgatatcacgacgttaaaaatcgatgctattgttaatgctgcaaatagtcgttttctaggatgtatgcaagctaatcatgactgcattgataatattattcatacaaaagcgggtgttcaagttcgacttgattgtgcagagatcattcgacaacaagggcgcaatgaaggtgtaggtaaagccaaaataacacgtggatataatttgtcagcaaagtatataattcatacggttggtccgcaaatacgtcgattgcctgtttcaaagatgaatcaggacttgttagctaaatgttatcttagctgtcttaaattggctgatcaacatagtttaaatcatgtcgctttttgctgtatatctacaggtgtatttgcttttcctcaagatgaagcagcagaaattgctgttcgaacagtagaaagctatctcaaagaaacaaattcaacattgaaagtcgtgttcaatgtatttacagataaggatttacaactgtataaggaggcatttaaccgtgatgcagagtagtaagtggaatgcaatgtctctgttaatggatgacaagacaaagcaggctgaagtattgcgtactgcgattgatgaagcagatgcgatagtgattggaattggtgcaggcatgtctgcatctgacggatttacatatgtaggagagcgttttacggaaaatttcccagattttattgaaaaatatcgcttctttgatatgttgcaagcgagtttacatccttatggcagttggcaagagtattgggcatttgagagtcgttttattacattaaactatttagatcaacctgtaggtcagtcttacctcgctttaaaatccttggtggaaggtaaacagtaccacattataactacgaatgcagataatgctttcgatgtagctgattatgatatgactcatgtatttcatatacaaggggagtatatactgcaacagtgtagtcagcattgtcatgctcaaacgtatcgcaatgatgatttaattcgtaaaatggttgttgcgcaacaagatatgcttataccttgggagatgattccaagatgtccaaaatgtgatgccccaatggaagtgaataaacgtaaagcggaagttgggatggttgaagatgctgaatttcatgcgcaactacatcgttataatgcttttctagagcaacatcaagatgataaagtgttgtatttggaaattggaattggttatactacaccacaatttgtgaagcatccttttcagcgtatgacacgtaaaaatgaaaatgccctttatatgacgatgaataaaaaggcatatcgcattccgaattcaattcaagaacgtaccatacatttaactgaggatatctcaacattgattacagcagcactccggaacgacagcacaacgaaaaataacaacattggagagacagaagatgtacttaatagaaccgattagaaatggagaatatattactgatggtgcgattgcactcgctatgcaagtttatgttaaccagcatatctttttagatgaagatattttattcccttattattgtgatccaaaagtggaaattggacgttttcaaaatactgctatagaagtgaatcaagattatatagataaacacagtattcaagtagttcgccgagatactggtggtggcgctgtgtatgttgataaaggtgccgttaatatgtgttgtattttagaacaagacacttcaatttatggtgattttcaacgattttatcaaccagctataaaggcgttgcatacattaggtgcaacagatgtggtacaaagcggtagaaatgatttaacattgaatggtaaaaaagtgtcaggcgccgcaatgacattaatgaataatcgtatttatggcggttattcgctattacttgatgttaattatgaagcaatggataaagtgttaaagcctaatcgcaaaaagattgcatcgaaagggattaaatctgtgcgcgcacgtgttggtcatcttagagaagcactggatgaaaagtatcgtgatataaccattgaagaatttaaaaatttaatggtgacgcagattttgggaatcgatgacattaaagaggcgaaacgatatgaattaacggatgcagattgggaagcgattgatgaattagctgataaaaagtataaaaattgggattggaattatggcaagtcacccaaatatgaatacaatcgaagtgaaagattatcttcaggtacggtagacataacaatttctgttgaacaaaatcgtatcgcagattgtcgtatttatggggatttctttggacaaggtgatataaaagatgtggaagaagcattacaaggaacaaaaatgacaagagaagatttaacgcatcagttaaagcaattagacatcgtttattattttggcaatgttacggtagaagcattagtggatatgattttaagttaatattgttattttatgtatgctgaatcattggaagtgtttgcttgctcttgaaaaggtgacaatagtgtttggtgaaggttgaacatatgagtggaaattattgcctttaactattcaaagtatgatatatatatggtttttgtttctaaatgattgggtatttgaaaatagatgagtttaatattttaaggaatataatgatgtttacttttataattcatatagaatattaagcaatataagtctgttgatatatacaaaatataatgactgctataatgagtaatcaatagacacaaagaggagattatgtgatgaataataaagtattagcaaccggtggtacagggtttgttggcatgcgaattatttcacgattattagaacaaggttatgacgtacaaacgacgatacgtgatttaagtaaagctgataaagtaattaaaacaatgcaagacaatggcatttccacagagcgattaatgtttgtcgaagcggatttatcacaagatgaacattgggatgaagcaatgaaagattgcaagtatgtcttgagtgtagcatctccggtgtttttcggtaaaacagacgatgcagaagtgatggcgaagcctgcaattgaaggtatacaacgtattttaagagctgcagaacatgcgggtgttaaacgtgtggtaatgactgcaaactttggtgcagttggttttagtaataaagataaaaattcaatcacaaatgaaagtcattggacaaatgaagatgaaccaggcttatcagtatatgaaaaatcaaaattgttagctgaaaaggcagcgtgggattttgttgagaatgaaaatacaacagtagaatttgccacaatcaatccagttgcaatttttgggccatcattagatgcacacgtttcaggaagctttcatttattagaaaatttattgaatggttcaatgaaacgtgtaccgcaaattccgttaaatgttgttgatgtgagagacgtagctgaactgcacattttggcaatgacaaatgaacaagctaatggcaagcgatttattgcgacggctgatggacaaattaatttgttggaaattgcaaaattaattaaagaaaagagacctgaaatagctcaaaaagtttctactaaaaaattaccagactttattttgagtctaggtgctaaatttaatcatcaagctaaagaaggtaaacttttattagatatgaaccgcaatgtaagtaacgaacgtgcaaaaacattacttggttgggaaccgattgcgacacaagaagaagcaattttagcagctgtcgatagtatggctaagtatcatttaatataatacaaaacaccgtccataagtaagtggctttcctcttgataaaaggggcattcactcaatatgtgacggtgttttatatttctacgttaacactattgctgttctttttgacggccttttaataaaattgttgtcgcacctacgataataataaatagaatcgcaccaaataatcccatatattttactgcgttaccgaacacgataccgacagctaaaaagtctgtatctgagaatgttgttgcagcaccacctaattcgcctaaaaatggcaagaataataatggtaaaaacgtgattaggataccatttagagcggcgccagcaatagcacctttaataccgcctcttgcattaccgaatacagcagccgttgcacctaagaagaagtgtgcaactacgccaggtaaaatgacgacgccaccaaataagaataagataaacataccgatgacacctgtaataaagctgacaaagaatccaattaatactgcattttgtgcataagggaacacaatagggcagtctaatgcaggtttagaatttggtacaagcttttcagaaattcctttaaatgctgggacgatttcagctaagattaaacgaacgcccgttaaaataataaatacaccagcagcaaatgtcacaccttgaattaatgaaaagacaataaagttttgaccatcactaatagattcgtgtacataactaacgcccgcaaataagcatgcgatgaagtaaagtaatgccatcgtaatcgagatactaattgtactttctcgtaagaaacttaagccttttggaaatttaatctcttccgttgatttagacttacctttgaataattgacctacagcacctgcggcaaagtaactgattgagccaaaatgacctaaagctacttggtcattccctgtaatttttcgcatcgtaggttggagtaatgcaggtaatactgccatgattaatcctaatacgagtgcgccgataacaatcgttagccagcctttaatatgactgactgttaaaatgattgctaaaaacgcagccatgtaaaatgtatgatgacctgttaaaaagatatattttaaattagtgaagcgggcaattaaaatattaacaatcatgccacagaccatgatgagtgcagctgttgttccaaaatcttttaaggctagtgagacgatagcttcgttgttaggtacgataccttgcacaccaaatgcgtgttggaatattttgccgaatggttcaagagatcgaacgacgacatcagcacctgcacttaaaattaagaagcctaatatcgttttaatggttcctgaagtgatcgttgcggcaggttttttctgaacgattaaacctataaaggcaatcagtgcaacaagaatggctggttgacttaaaatatcgactataaaattaaggattgcttgcataggtcgtacctcctttaaatcatgttaagttgttgtaatttttctgagagcttttgttgtaattcagctttatctaaaatattatcaagaactaagacatcccctagacgttcggcattttcagctaaatctctaccacaaataaacaagtcagccatctctggacttgctgtcataatgtcactatgttcaacttcgatatcagatggtgcattaagttgcctaagtgcttcttgtgcgttcatttctaccataaaactacttcctaaaccgtggccacatactactaaaattttcatattaatcatgctcctttaaaatgtttttaatgtcttgtgcatttgttgcagttaatagttgctggactgtttggttatcgcccagtacggttgctaaattttgtaatacagataagtgtgaatgattgtcgatggcactcaatacaaaaatgagagatgcgtagtgatcttcatcacaaaatgccacatgttgattcaactttaatagacttaaaccaacttgatgtacgtcattgttcggtcttgcatgtgcaattgcaatttcaggtgcgataacgatataaggtccaagttcattaacgctatcaatcattgcttgaacatagccttgttcaataatttgttcttgtagtaatggttgagaagctatagttatagcttcagtccaatcatttacttgttcttttacaatgatgcgtgttgttgacaaaatgtctaatgacacgttattaagcctcctttgtcatagttaaagcaatgtgttgtttaattttaaaaatattcccatctaagaaatcttgtcgatataagtcgttgcttaagcattcgcttaactgtcccaatgcctttaaatgtgcattggggtggtccgttgctaatgtaattacaaggtgaacgggatcgttagctttactaccaaagataatcccttcagtgaaatatgttagtgcgaaacctacaccattctgtacataatcagtaccagcgtgaataagtgcaatatgtggactaatgaccatatatgacccgaattgttcaaattgttttaaaattgcagctgtataatttgaatagacaatgccatcattgattaaaggttgcacagccactgcaattgcggattcaattgataatggttgtttatttataatgatgcgatgttcaggcaataaatctgcgagtgacttgccatcagttgccattttcatgactcgttgttctcttgagtcattgataatttgattcaatttttgacgagattgttgattgataaatggatcgacatgaataactggtacagctgatatttcacaaggtactgttgaaatgacataatcaatgttatcttgcaataatcgactttcttccaattgataaatggaataggcatcccaaatgtgaaactcaggatacaggtgatttagttttgattttaaaagttgtgacgtgcctataccagaaccacatagtaagacaaccttaatcattgattgtttatgtgttgcaacacgctctatacttgatgcgaagtgaattgtaatgtatgttaattcatcttcgttgaagcgaatagcagcatcttgttcaattggactaatatgcttgctaacggcttcaatgatttgaggatagcgacgcataacttcttgcctcaaaggattaggttgtagcatatcgtatttaatacgatgtatagctggtttgatatgtgtgatcagactggtatgtaacttgttgtcttttgacatatcaatgcctaattcttggctaacacaagtgatcaattcatgtatattttgcgataaatcatggtattcaaaggtaattgaagatgctgtatgttcagtcattttagagcctagtaaatgtaacgtgataaagataatttcagactctggaaatgtgacattacaactgcgttctaagttttctatcatttttgaagcaatagcatactgattagtatgtcgccatttatcaatttcattgataggtatatcgaacgaaaaattttcatttaaacgctgaatggcaatgagtatatgatagattaagccatcgatagccgactgaactaaatgataattttcactatttaatgtcttaataatggcacggcgaaccaatgcgattgattctgaattaaagatatccgcctctataaaaggtgcagcttgtttcatatattgatgtataaagtgtgcatacgctttacgataatgatcttcctcaccaataatattgaatcctttattgtggacataatttaactttaaatggtattgatctagttgggcttgaatcattttaatatcatctgcaattgtccgacgcgaaacattaacatcttgcgcaagttgctttgttgaaacaggatcggttgtttcgaataactttaaagcgatatgtgtgagtcgttcatcttttgaaaaatgaatttgatttgttagattgtgctctaattcatttaatagtgtcgcgtgagctgttgttactttgatgcctgcagctttattacggctgacttggtaatgataagtttcagcatattgctcaatatatgctatatcatattgaatggtacgaggtgatacaccaagttgattagcaatggtattgattggaataaacgtttgctcatgaattaaaagatacaaaatttcgatttgtctataacttaacaacgtaatatcctcctatttgtaattgtaagcgatttcttaaaaacgtagatatgcaatctctttcatattttaatccgaaaaattgcatatcaaaatgtttatggcgcaagattttataggaacttttaaaataaattagatattcatgttgacaatttaaaaatgtcgcagtatatttagttagacatctaacgaaatggtggtgcaataaatggaattcacttattcgtatttatttagaatgattagtcatgagatgaaacaaaaggctgatcaaaagttagagcaatttgatattacaaatgagcaaggtcatacgttaggttatctttatgcacatcaacaagatggactgacacaaaatgatattgctaaagcattacaacgaacaggtccaactgtcagtaatttattaaggaaccttgaacgtaaaaagctgatctatcgctatgtcgatgcacaagatacgagaagaaagaatatagggctgactacctctgggattaaactcgtagaagcattcacttcgatatttgatgaaatggaacaaacactcgtatcgcagttatctgaagaagaaaatgaacaaatgaaagcaaacttaactaaaatgttatctagtttacaataaatgataagtgtgactggtagaaatcagtcactttgtctttaatattatagttagatatctaattgttagtaagctaattattggaaaagacaaggagtattgaacaatgaaagacgaacaattatattattttgagaaatcgccagtatttaaagcgatgatgcatttctcattgccaatgatgatagggactttattaagcgttatttatggcatattaaatatttactttataggatttttagaagatagccacatgatttctgctatctctctaacactgccagtatttgctatcttaatggggttaggtaatttatttggcgttggtgcaggaacttatatttcacgtttattaggtgcgaaagactatagtaagagtaaatttgtaagtagtttctctatttatggtggtattgcactaggacttatcgtgattttagttactttaccattcagtgatcaaatcgcagcaattttaggggcgagaggtgaaacgttagctttaacaagtaattatttgaaagtaatgtttttaagtgcaccttttgtaattttgttcttcatattagaacaatttgcacgtgcaattggggcaccaatggtttctatgattggtatgttagctagtgtaggcttaaatattattttagatccaattttaatttttggttttgatttaaacgttgttggtgcagctttgggtactgcaatcagtaatgttgctgctgctctgttctttatcatttattttatgaaaaatagtgacgttgtgtcagttaatattaaacttgcgaaacctaataaagaaatgctttctgaaatctttaaaatcggtattcctgcatttttaatgagtatcttaatgggattcacaggattagttttaaatttatttttagcacattatggaaacttcgcgattgcaagttatggtatctcatttagacttgtgcaatttccagaacttattatcatgggattatgtgaaggtgttgtaccactaattgcatataactttatggcaaataaaggccgtatgaaagacgttatcaaagcagttatcatgtctatcggcgttatctttgttgtatgtatgagtgctgtatttacaattggacatcatatggtcggactatttactactgatcaagccattgttgagatggcgacatttattttgaaagtaacaatggcatcattattattaaatggtataggtttcttgtttactggtatgcttcaagcgactgggcaaggtcgtggtgctacaattatggccattttacaaggtgcaattatcattccagtattatttattatgaatgctttgtttggactaacaggtgtcatttggtcattattaattgctgagtcactttgtgctttagcagcaatgttaatcgtctatttattacgtgatcgtttgacagttgatacatctgaattaatagaaggttaaatatttcgtccacttctggctgagtatatttcggtcggaagtgtatttttcgaaaaaaataaatatatgatacgattatgaaaaaataaagtgagattggcatatgtgtaaatctaaaatactgttgaaaaatatttttagtgaagaatcagaagttaaagatttaactgaagaaaaatataatcaagattacgaagcattaacatttagctttaaagaggaaacatatcaaagtaggttagctaagaaaacaccgactaaatcgggatatttcgtgacatgttggacaaaagacgaagataattataatcggccatacaaaattgaagagtttgctgattacctgattgttgctgttatcgatgatgaattaaatggctactttctatttcctagggaattattggtagaaaaaggtatcttagcttcatctaagtatcaagggaaaatggcttttagagtttatcctaagtggtgtaatcaattgaataaaacagcagggcaaacacaaaagtggcaatgtaaatatttttttgaatactaataaaaagtcatatggttgaacttataagagatgaatatatcatctttcgataagataaccatatgactttattttttatcatttaatgatgaacggtttcttgtcctactttattccaagtgaggataaagctcaacattgcaaacacactaattgctgttaataaaataaaaccgacatcccatccgaatttatcaactacagcacctaagacgatgttggccattacagcaccaaacagataaccaaataatcctgttaatccagctgctgtgccagctgcttttttaggtacataatctaatgcttgtaaaccaattaacataactggtccatatattaagaaaccaatggcaattaatgagacattgtctaaccaagcattgcctggaggatttaaccaataaattaatacaaatactgtgacacctaacataaagaagaaacctgcaggtccacgacgacctttgaataatttatcagaaatgtaaccacataataatgtaccaggaattccagcccattcgtataagaagtatgcccaacctgatgcttttaagtcgaaatgtttttcttcacttaagtagactggcgcccaatcaagtacaccataacgcacgaaataaacaaatatatttgcaaaggcaattgcccatacccatttattgttcagtacatatttaaataaaatttcttttgtagttaattctgtttctaatgttttcttatcgcttgtagcaaagtcatttttataaatttcgattggaggtaaaccttgagattgaggtgtgtctctaatcaatacgtatgaaattgcggcaatgataagtgctaagagtgcagggtaaatgaatacaccttcgaaaccttttaaataaccaaagttgataaatgcagttgttgtaataccccaagcagcaataggtgccataatacctccaccaacattatgcgcaacgttccaaagggcagtcttacttccgcgttcacttacactaaaccagtgaacgagaacacggcctgaaggtggccagcccataccttgaaaccatccatttaagaataataggacaaacataataccgatacctgatgtgaagaacggtacaaatcccattaacaaattgacgatagcagtgagtgctaatccaagaactaagaatatccgagcattgctccgatcacttacagtacccataaagaacttactaaatccatatgcgatggaaacagcagaaagtgcaaaacctagttccgcttttgtaaaaccttgctcttgcaatgccggcatcgctaacgaaaagtttttacgtaataaatagtacccagcataaccgatgaaaataccaagaaatacttggagacgtaatcgtttataggtatcatctatctgattttctggcaaaggcttaatatgctttgcaggtttaagaaaattcataaaatcctccttaatatgtatttatatgcattttgtgcgataaacttatattagacatgtatgaaagcgttgtcaatatgcttttgtgaaatcttgcatatttagttattgaagtattttataaacatttagaaaaaataaattgctacacataaatttataattatgcaattattatgtcgttatacatactagctgtgtatctacgaatgagtacaaacatatttttatttgcaaggggtaaatggcatataactatcttttttatgtaagctggtataaaatttatactaataggagggatagtatgaatatagtagggcatcatcacatatccatgtatacaaaagatgcaaaacgtaataaggatttttacacaaatgtccttggattacgattagttgaaaagtcggttaatcaagacaatccttcaatgtatcatttgttttatggggacgaagtaggtacagccggaacaattttaagcttttttgaaattcccaatgcgggtcataagcagccaggtactgaaacgatttatcgattttcattattagtaccaaatcaagcggcacttcattattttgaaaaacgtcttgagaataatggtattaagtctgaacgtttgtactatcttggacaagaaggtgttgtctttaaagatgaagacgacttagaaatcatattgcttgttaatgatagttttgaagtaccacatcaatggcaacataacgcttatagtgaaatacctcaagcatatcaaattttaggaatagggccagtcgaattaagagttagaaatgcagcgcgtacggtagaatttttggaaaatgtcttaggttatcgcaaaagagataataaatcattcgatgtgctgacattagcaccacaaggtttatattcggattttgtagttattgagcaacagggacaacgtgaaagacctggacgaggttatatccatcatattgcagttaatacaccacaaatgagtgacttagatgcaatttacaagaaattacaacaacaaccacaaagtaattcaggtataattgatcgctatttctttaaatcattatactatcgccataattcaattatgtatgaatttgcgactgaagcgcctggatttactattgatacacctgttgaacaattaggaagtcaattgaacttgcctgactttttagaagcagaacgtgaacaaattgaaagtaagttacacgaaatataaaggagaatgtttaatggccaaattagaaatgaataaaaatacgcctcttgagtttggtttgtattccttaggtgatcatttattgaatccattgaaaggtgaaaaagttagttatgagcaacgtattaatgaaattattgaagcaagtaaattagcagatgaagcaggtattgatgtttttgcagttggtgaaagtcatcaggagcattttacaacacaggcacatacggttgtgttaggtgcaattgcccaagcgacaaagcatattaaagtttcaagttcttcaacgattattagtgcaacagatcctgtaagagtatttgaagacttcgcgacattagatttgatttctcatggtagagccgaaattgtagctggcagagcatcaagaacaggtatttttgacttgtttggctatgatttaaaagactatgatgaattgtttgaagaaaaattaggtttacttttagagttaaataaaactgagcgtattacttggtctggaaaatatcgtccagaacttagaaatatgaaaatattcccaagaccaatcgataatatattgccaatatggcgtgctgttggtggtccacctgcaagtgctattaaagcgggaaaacaaggtgtgccaatgatgattacaacccttggtggcccagcaatgaactttaaaggttctatagatgcttatcgtcaagcggcaactgaagcaggtttcgatgcttcgcctaagtctttaccagtaagtacagcgagtctgttttatacagctgaaacaactcaggatgctatgagagaattttatccacatttgaatacagggatgtcatttattcgtggtgttggttatccgaaacagcaatttgctaattcgtcagattatcgagaagcgctaatggttggaagcccgcaacaaattattgaaaagatattgtatcaacacgagttgtatggtcatcaacgttttatggcacagcttgattttggcggtgtgccatttgaaaatgttatgaagaatattgagttaattggcaacgacattataccggcgattaaaaagcatttatcaaaataggaggggcgtcatcatgaatattgtattattgtcaggttccacagtaggttctaaaacgagaattgctatggatgatttaaaaaatgaactagaagtcatcaatgagggacatcaaatagagttgatggatttacgagaacttgaattagaatttagcgttggaaagaattatctagatactacaggagatgtatataaattaacgacgtcgttaatgcaggctgatgtgatttttattggttttccaatttttcaagcttccatccctggtgctttgaaaaatgtgtttgatctacttccagtcaatgcgtttcgtgacaaggtaataggacttgtagcgacagcaggttctagtaaacattatttaattcctgaaatgcatttaaaaccaatattgagttacatgaaagcacatacgatgcaaacgtatgtatttattgaagagaaagatttttcaaatcaacaaattgtcaatgatgatgttgtatttcggttaaaagcgttggcacaatccacaatgcgaactgccaaagtacaacaacaagtgtttgaagaagaaaacaaccaatacgacttttaaagtataaaaataagacgctcggcacactaaatttgtaagtgtttgagcgtcttttcatattaactatatagccaatgaacgacgataaaggcaagtgatgacaagcatattgaggtaataatgattgtcataagcggtttaagtgcgcgatttttaagatctttaaatgcaacatttaaccctaaagcaaccatggccattaataagcaaattgttgatacagtatttaaaatatttagcaatgctgacggaatagttacatatgtattcactaaggccataatgacaaatccaattaaaaagtatggaatgcttattcgacccttgctagatgattctgatgaacggaaacgcataattaaaataagtacgatggttaatggaatcagtaagaatactctaccaagtttaccaagaagtgcaattttaagtgcatcactaccaccaaagccaccagctaagacaacgtgtgcaatttcatgaagactaacaccagaccaagcgccataaacatttgtcgtcattgaaaagatagcgtagatagctgtatatataagtgaaaatatcgtaccaatcaatgcgatgataccgatactaatagctgtatccttttcacgtgatttgaatattggagcgactgcggcaatagcagcagcaccacaaacgcctgtgccgacacctagtaataatgcgatgtttttgtcaccatgcaacagtttgttgacaaagagcatcattacaatactgaaaataacgacacctacatcgatggctaatagtttactaccttgaccgataatatcgaatatattgagtttaagtccatataggatgattgcaaatcttaataaatatttagatgaaaacgtaatacctgagctatattgttcaggatatcctctaaagtgacgatatagaatagcgattaatatcgcgatagttaatgcgccaaccttatctaggattggcaatttagctgctaaaaagctaaataatgcgactataaatgttagtgatagcccaatcataaaatgcttatttttcaatgatgccatgagcagtgcctcctttaatagcattttagcactgttttgtcgtatttttaaatataaatttggaatgaataataaagtagtgattaaattaagttgtgtgataggaaacttggacatcaatcaaagtaataggcactacaacgcttattggcggggccccaacaaagaagctgacgaaaagtcagcttacaataatgtgcaagttggggatgggccccaacatagagaaattgggtccgtaatttctacagacaatgcaagttggcggggccccaacatagagaatttcgaaaagaaattctacaagcaatgcaagttggcggggccccaacatagagaatttcgaaaagaaattctacaagcaatgcaagttggggaaggacaacaaatttaagatacaatgcgtaacattaatatgttattataatgataatttacagaattatatgaaaaatgaatgaggatgtgatggtatgtttggaatgaaagtgaatgaacaaataacattaaaaattttagaagctcatgacacagaagcgcttttcaatttagtcaatcgttcaagaaattcacttagggaatggttaccttgggtagatgcaactgagcaaccatcagatacgcgtgcatttattaaaagaggacttttgcaatttgctgatggtaatggatttcagtgtggcatttggtatgaaggaacgctagttggtgtcatcggtttacatgaaattaatcacatgcacagaaaaacttcattagggtactatttagataaagaatttgagggtcatgggattatgacacaagcagttgaggcattgataaagtattgtttcgaagagcttgacttaaaccgaattgagattagtgccgcagttaataatgaaaaaagccgggctattcctgaaaggctgggatttactagagaaggtatgttacgtgacaatgaattactaaatggtatttattcatcgagttacatctatagtttattaaaatcagaatacgaccaaaaatgacaaattagacttacaaaagagtgatgacatttaaaatggcagcgctcttttatttaatttttgaaaataaaaggttgttgacagtattattttataacaatataatgattttgataattattatcaactagatgatgtttatgggaggatgctttaaaacagccgttttaagtgtaatgtattattttagcgtgtagggaatgcgaaaataatatttataagaacacatctatggggataatagaatttctataatgaggtgtcaaaatgaaaaagttaacaacgctattattagcatcaacgttattaattgctgcatgtgggaacgacgatagtaagaaggatgattcaaagacatcgaaaaaagatgatggtgttaaagcagaattaaaacaagcaacaaaagcatatgataaatatactgatgaacagttaaatgaatttttaaaaggtacagaaaaatttgttaaagcgattgaaaataatgatatggcccaagcaaaagcgttatatccaaaagttcgtatgtattatgaacgctctgaaccagttgcagaagcatttggagatttagatcctaaaattgatgcacgtcttgcagatatgaaagaagagaaaaaggaaaaagaatggtcaggatatcataagattgaaaaagcattatacgaagataagaaaattgatgatgtgactaaaaaagatgcacaacaattattgaaagatgcaaaagaattgcatgccaaagctgatacattagatatcacaccaaaattaatgttacaaggttctgttgacctattaaatgaagttgcaacttctaaaatcacaggtgaagaagaaatttattcacatacagatttatatgattttaaagcgaacgttgaaggcgcacaaaaaatttatgacttatttaaacctattttagagaaaaaagataaaaaattaagtgatgatatccaaatgaacttcgataaagtgaatcaattattggataaatataaagataacaacggcggttatgagtcatttgaaaaagtatcgaagaaagaccgtaaagcatttgcggatgctgttaatgcattaggagagccactaagtaaaatggctgtgattactgaatgacaaattatgaacaagttaacgatagtacgcaattttcaagacgtacatttttgaaaatgttaggtattggcggtgccggtgttgcaattggcgcaagtggtgttggtagcatgtggtctttcaaatcaatgttcaatacaccagaagatccggaaaaagatgcgtatgaattttatggtaaagtgcaaccaggcattaccacacccacgcaaaaaacatgcaatttcgttgcgttagatttgaagtcaaaagatagagatgcaattaaggcaatgtttaaaaagtggacggttatggctgatcgtatgatggatggtgatacagttggcaagccgagtaacaatcctttaatgccaccagtagataccggtgaatcgataggattaggtgcaagcaagttaacgattacctttgggattagtaagtctttgatgaagaaaattgggttatctagtaaaattcccgatgcctttaaagatttaccgcattttccgaatgatcagttaatagacgattacagcgatggtgatattatgattcaagcatgctcaaatgattcgcaagtatcctttcatgcggttcataatttagttcgtccatttcgagatattgttaaggtacgttgggcgcaatctggttttatctctgctaaaggtaaggaaacacctagaaatttaatggcatttaaagatggaacaattaatcctaggaagaataatcaacttaaagattatgtgtttattgatgacggatgggcgaaacatggaacttattgcgttgtcagacgtattcaaatacacattgaaacgtgggatcgtactgcgctggaagaacaagaggctacatttggtcggaaacgacatagtggtgcaccgttaacaggtgggaaagagtttgatgaaattgacttaaaagcgaaagatagtcatggcgagtatattattgataaagatgcccatacgaggctagcgaaagaagcaaatacgtcaattttacgtagagcctttaattatgtggatggtacggatgaccgcacaggtaacttcgaaacaggcttactttttattgcttttcaaaaagcgacaaaacaatttatcgatatacaaaataatttaggtagtaatgataaattaaatgaatatattacacatagaggttctgcttcatttttagtattaccaggtgttagtaagggaggataccttggtgaaacattatttgactaaatttgtagcaatgctaataactgctgctatggtgtgtagctttgggttactgaaaagtcaggcagcagaacaacaaagtattagtgatgtatatagtgtgataacggatgcgaaatctgcactttctaataattcgatatcgaatgacaataagcagaaagcaattgagcaagtggtaagtgcagttaagaaattatcgcttgaagataatagtgaaagtaatgctgtcaaatcagatgtgagaaagcttgaagatgcaaaagcgaatgataatcaaaaagatacactttcgcaattaacgaagtcattaattgcttatgaagagaaattggctagtaaagatgcgggttctaaaattaaactattgcaacagcaagtcgatgctaaagatgctgcgatgacaaaagcgattaaagataaaaataaagcggaattagaatctttgaacaatagtttgaatcagatttggacaagtaatgaaacagtgattcgcaattatgacgcaaatcaatatggacaaattgaagtcgcattattacaacttagaattgcaattcataagtcaccattagatacggcaaaagtgtcacatgcttggacaacttttaaatcaaatattgatcatgtcgataaaaaaagtaatacgtctgcaaatgatcaataccatgtatcacaattaaatgatgcgttagagaaggcgattaaagctatcgacgacaatcaattgtcggatgctgatgctgcgcttacacattttatagaaacttggccgtatgttgaaggtcaaattcaaactaaagacggtgctttgtatacgaaaattgaagataaaataccatattatcaaagtgtattagacgaacataataaagcacatgtgaaagatggtttagtagatttaaataaccaaattaaagaggttgttggccatagttatagcttcgtcgatgtgatgattatctttttacgtgaagggctagaagtgttgttaattgtaatgacattgactaccatgacgcgtaatgtaaaagataagaaagggactgcaagtgtgattggtggtgcaattgccggacttgtactgagtattatcttagcaattacgtttgtagaaactttagggaatagtggcattcttcgtgaaagtatggaagcgggattaggtatcgttgcggtcatattaatgtttatcgttggtgtttggatgcacaaacgttcaaatgcaaaacgttggaatgacatgattaaaaatatgtatgctaatgcgattagtaatggtaatttggtattgttagcgacgattggtttaatatctgtgttgcgtgaaggtgtcgaggttatcattttctatatggggatgataggtgagctagcgaccaaagattttattattggtattgctttagctatcgttattttaatcatctttgcattattatttagatttatagttaaattaatacctattttctatatatttagagtgttgtcgatctttatttttattatgggattcaaaatgcttggcgtaagtattcaaaagttacaattattaggtgcgatgccaagacatgttattgaaggattcccaacgattaactggttgggcttttatccaagttatgaaccattgatagcacaaggtgcttatattatggtagttgctatcttaatctttaaatttaaaaaataaaaaacaggccgagtgcctgtttttttgttgctatattggaaatattcggtattgcagtataacgataatcacagcattgattcgtataaggttaatgtgttggcggtttgcctcggcatgtgaacttaacgatgaacatactgaactcaaagagcaatatgagtggcaatgtgagtaatatatttaatgttaaatcgggtggtgcaatgatacttgctaatacaaagcaagcgaaataaatatatttacgataatgtttcaatgatgtggtatctataagaccgaattttgcaagacccataaataatattggtaattgaaatagaagaccaaatgtgaataaccaacgtatgagttcaatcaaatatgctttaaagccaatgacaggcgaaatgtttaaagttaatgataattttaacgcgaattgaatgatcattggaaagccaacataaaatgcaaaagcgacgccagcacagaataataacacgctgaaaaaactatatttataaataaattgacgttcattattatgtaatccaggtgcaatgaatgcccacaattgataaaacatgactggtgaaatgaaacaaaacgcgatgaaaaatataatcatcacgtatatttgtatcatttctgtgaatgaaaatgcatgtaaggacacatgtgcacgggtaatatacgttatgaatggtgtcatccaccaaaatgatgaaacatatacgacgatgaccgtaatgacgaacgacaataaaatttttactaaccgatggcgtagttcgctaaagtgaaccagtaaggtgtggtcagtgctattgctctcgctgttgtttcgattccttactgggtgtatcgtgagactctttatctaaatcttctgttgcagatttaaattcttttaaagtagaaccgatggcacggccaaattgtggtaattttttcggaccaaaaataattaaagcgataatgctaatgacgacaagacttgttgggcctgtgatgcctaaaataaaagtgttagttatcatgataatcaacctcactcataagtagtatatagtatttactttataccgaacgataatgattatcaataaaattttatgaaataattaaaatgttgctataaatatagtttattgagggattaattctgaaataacagcttggtcttgcaagtcgatataagtacaagtgcccgcttgaatatcgatatgccatttataaatgccagcttcagccatttcatcacaaaatgtttcaaaatctgtttgcccttgttgatgtctagttaagacgtcttgaactattgttttgtttgatttttgagcaacaggatgattactttttacagatgacgtaacgatatcatcttctgattgatgtacgtatgttgcagtgccatcttgaatgttgacgatattgtaagtcatccccatatctttaaaagctttgaatagttttggaaagtcaacaccagtaaattgttgatgtgcttgttgaattgcagataatgtaaatgccataatagtctcctttgaatggtttgatttagtgaaaatgcgtgcatcatactaaaattagaatgctgttaattatgcaggaaggtgtaacgaaagtaaacaattatgacttgtaggcgttgaggtgtttgtttcaaaatgtcatacataggtggataatcatattttttggtgtagatttgacaaatatagttgtcaaaaagacgcatatcatttacagtgtaattaaggagttgatgcgatgtgcgtaatcgattgaaagaattacgagcacgagatggcttaaaccaaacgcaacttgctaaacaagcgggcgtttcaagacaaaccatatcgctaattgagcgaaacaattttatgccatcagtattaacggcaataaaaattgctcgcattttcaatgaaacggtggaaactgtttttattattgaggaggatgaggcatgaaaatactaagatatatcggatatcttttactgggtggacttgtagggggtatcataggtggaattttaggtaattttgatggatttggtattgagaacttgacgtttgcgacatataacaatgtcgttgtaatatcgattgttgcgacgattattatcatattggtagaagccattgttttgatgaatcaaagacgtgcattgaagtataagcaacttgtagataaagaggtagatatcgatgcaacagatcaatatgagttgcttgcgaatcgttatgttttaaatggaagtatattaagtattctgcagacagttattgcttttttagtattgcttatttttgtggtagggcacgctgcagcaaatgcaatactattctttttaataccattttttgctaatgctattttcaatacacaatttacactgtttaatagaaggtttgatgacagaataccaaaaattgcagataagaattacactgaaaagcgattggaaatattggatgaaggtgaacgccatatagaattaattgcattatttaaaacatatgcgatcaacttatcaatattgatactagccattgtagtaattgggctttattcaattactactggaattaatcaaagctttagtttgctacttatcattgctattttcatatataacgcctttagttatttattgaagagaagacgtttttattaaaattaaacaaagaggagcatggatatgacaacattgttaaacgtagatagtgtgaacaaacaatacaaagattcggattttaaattgcaagatgcatctttaacgatttctactaatgagacagttggattaattgggaaaaatggctcaggtaaatcgacattaattaatattctagtaggcaatcgacataaagataacggtagtatcacattttttggagaagaacataccgtggatgatgtcgaatataaagaacacataggtgtagtgtttgatgatttgagagtgcctaataaattgactattaaagatattgataaagtatttcaatctatttatatgacttggaatagtcaaaaattctttgatttaatcaaatatttcgagttaccactacaaactaaaattaaaactttttcaagagggatgcgaatgaagatagctttaacgattgcgctttctcatgatgtgaagttattaatcttagatgaagcaactgcaggtatggatgtttctggaagagaagaagtaatggaaatactagaagattttgtcgcacaaggtggaggcatcttaatatcatcgcatatttctgaagatatagaacatttagctgataaattagtgtttatgaaagatggacgaatgattttaactgaacagaaagatatacttttagcacaatatggaattgttacgacagaagataaagatgttgaaattcctaagcatttaatcattgcttctagattgtcaaaggggaaatatcaaattttagttaaagattatgcagaaattgaaaatgcagagcctttaaaacacattgatgacgctacaaaaatcataatgcgaggtgaagtataatgaaaggtatgttcctaagtagtttttatgcaacgagaaagcaaacatatatttattttatagtcgctattatagctgcaggatactttgcagtatttaatccgttgatgagttcggcaatggctggggttatgttaatcacacctattactgataatattaaacatgaaaaagactcaagatggatgtattatgtatctactttaccggttaaacgtagtgattatattaagtcatactttgccttttatttaatcttattcggtgcaagtttaatgattggattagttgtgactacgattgtgacccaaagtgtgatgattggtattatgtcaggtttaatgagttttggtatcataggggcatactctatcattttcccattgacatttaaatttggcgctgaaaactccaatgtcattatgatatgtgcatctatactactacttatttctttcgtggtctttttctttatatatggtatggttagtggtgcatctgcattagaatttgaaaaaattagcactgaaggatggctagttgtcatagcatatgcggtcattggtatagttataacgagcgtttcttatatattgtctattaaaatttttaacaaacaagaactataattgtcgattttggtgatgatagtatttgaaataatatttagagcaggtgataaatctttacgattgtcatctgttctttttggtgtggaatgaaatgtgggggataagtataggtgacatatctatattgatttatttgttttgaggtggttatgttgtgtgggaattatttccttttagatagtggggattagaggatatatgttatttataagtatcatttgatgattgtataggctaacgatttcctcggaaatatttaaaaacctcgatcatgtagcataactgaagtttgtcacaaaagtataatgtgaagttcgacacttttggattcagttccaatactttgaccgaggtaaatactatttattcatgtttattacgtagacgttgatttttaaaataaatcagcatgatgcagaaggttgcaactgatactgagataatcattacatggtcgtgacctttaaataaaaggctgacaatataagacataacgagtatacctagtgaatatgaaatatacttcgcgtttgtcagttcattatggaaataaggcgtgattaaccataatccaatatagaatattaaaacactgatatacatcatattaatttcaaacaagtcatttagtttattgttattactaaaaacaattgcagcattaatcacacctaaagcgatattgattaatagatgcgtatacgataaacggaaaccgatagatgttaatttatgattaatataattttcagtaatgatccaatatacaccgaaaagactaattaaaatcataaattggaatatataaatgtaactaaaatgatcaatgctaaatgatgacgaagctaaaccaaccagtacctcgccaaagataataattgttagtaacgaaaaacgttctactaaatgcatcatattaacaggtgataatacaagatatttctgaaatggaataagtcctgtcgctgcaatgaatacgcctaaaaatccagggatgtaatggatactttgtggtagtactaatgatagaaatgataaaaatgaaatcacaaaggctacgctcgcaaaagcttgacatgtacgcttatcgccataatctaaccctgtacgtatatgtaataaatactgtaatccgatacttaaatacataattgccacgcataagaagaatgggaagaatgtcttttcaaagtccggatataggctgttagataggaagaccatgatgaacatattaaacatcataaacgagacgtctttgaatgtaacttgaccaaatcgatttgtaaaaaatgtttgatgagaccacattaaccataagaacaaactcatgacgatgtatttgaaaaataaatcagctgaaatggaaccgttttgtgttgttaaaatcacatgtgcaattttttgaatggcatagacgaaaattaaatcaaagaacaactcatggaatcctgcacgcttttcagctaaatgttttggtgttaatgcattaaccataaaattttaactcctttaagatgtgtaattaatttactaagtatactatttattttttctagtgaataggggcagatttggcgatgaagtggaaggagaggtgactgcaaggtaattgcggaattaacaatcatcagcgatttaatatttgactggagacgtcatggtaataaaaaattgatgagaaattgatggtgaaaccagctgtgaatagcgatgcaatgatagatagaatttaattagagtcattacgcgaaatgattaatgataatttgtggtaaatcaaagcataattttgtactatagatgaggatgatagagcatatttaagagggtgaaatgttaaagtgaaaccgtttacgtttccgattgcccaaacaaattacatcattgtataatatgatttgttaaatgcataacaagaatgaaaatgtaacatacgtagcaattggtttcataaattggatgttagtggcgtattggttcattagacgtattagtaataaaattgtatatatcataaggagatgaatatgacatgacgagagtcgtattagcagcagcatacaggacacctattggcgtttttggaggtgcgtttaaagacgtgccagcctatgatttaggtgcgactttaatagaacatattattaaagagacgggtttgaatccaagtgagattgatgaagttatcatcggtaacgtactacaagcaggacaaggacaaaatccagcacgaattgctgctatgaaaggtggcttgccagaaacagtacctgcatttacggtgaataaagtatgtggttctgggttaaagtcgattcaattagcatatcaatctattgtgactggtgaaaatgacatcgtgctagctggcggtatggagaatatgtctcaatcaccaatgcttgtcaacaacagtcgctttggttttaaaatgggacatcaatcaatggttgatagcatggtatatgatggtttaacagatgtatttaatcaatatcatatgggtattactgctgaaaatttagtagagcaatatggtatttcaagagaagaacaagatacatttgctgtaaactcacaacaaaaagcagtacgtgcacagcaaaatggtgaatttgatagtgaaatagttccagtatcgattcctcaacgtaaaggtgaaccaatcgtagtcactaaggatgaaggtgtacgtgaaaatgtatcagtcgaaaaattaagtcgattaagaccagctttcaaaaaagacggtacagttacagcaggtaatgcatcaggaatcaatgatggtgctgcgatgatgttagtcatgtcagaagacaaagctaaagaattaaatatcgaaccattggcagtgcttgatggctttggaagtcatggtgtagatccttctattatgggtattgcaccagttggcgctgtagaaaaggctttgaaacgtagtaaaaaagaattaagcgatattgatgtatttgaattaaatgaagcatttgcagcacaatcattagctgttgatcgtgaattaaaattacctcctgaaaaggtgaatgttaaaggtggcgctattgcattaggacatcctattggtgcatctggtgctagagtattagtgacattattgcatcaactgaatgatgaagttgaaactggtttaacatcattgtgtattggtggcggtcaagctatcgctgcagttgtatcaaagtataaataataagaaaacaggttatcacaacagtattaattacatgttggcataacctgtttttatttgtttatggatttattgggtaatattagtcatttgatggtttaattgcaaatgctctaacagggaacccaggtgcatcttttggtttagggctgatagcgtaaatgatggcgccacgagttggtaattgatctaaattagttaataactcgacttggtatttatcctgaccaagaatataacgttcgccaactaaatcaccattttttacaacgtccacagatgcatcggtatcgaatgtttcatgaccaacagcttcaacacgacgttcttcaattaagtacttcaaagcatctaatccccaacccggtgcatgttgttgtccgttcgcatctttgttttcaaacttttcaatattaggccaacgttttgaccaatcggtacgaagtgcaacaaaagtgccaggttcaatagtaccatgctctttttcccatgcttctatatgcgcacgtgttacgatgaaatcattgttgttcgctacttctgttgaaaagtctaatacaattaacggcaataccaattcttttaaatcaatgtcttctaaataacgtttattctcgacaaagtgaattggtgcatcaatgtgagtaccatattgcgttacaatattccaacgttgcacatagaaaccatgatctttaaccgtgaataaagttgaaacttcgcctttttcaaactcactaaaacgtggtatttctggatcaaatgtatgcgttaaatcaacccaagttgcttgttttaaagtatttaattgttgccataaaggatattgtgtcataaaatcacccgtttttagtttattatatgataaatgctgcgattattcttggcgtttagctttaacagcattcacaagcacagtcaatgcatctttaacttcttcttcttttcgcgtttttaaaccacagtcagggtttacccagaataatgagcggtcgatttgttgtagtgaacgattgattgctgtagtaatttcttcttttgttggaatacgtggactatgaatatcatatacacctagaccaatacctaaatcataattaatatcttcaaagtctttaattaaatcaccatggctacgagatgtttcaattgaaataacatcagcatctaagtcatgaatagcatgaatgatttgaccgaattgagaataacacatatgtgtatggatttgagtttcatcacgaactgaagacgttgcaagtttaaatgataaaacagcatctttaagatattgttcgtgatattcagagcgtaatggtaagccttcacgtaatgcaggttcgtcaacttggataactttgattcctgcagcttcaagtgctaatacttcttcgttgattgctaaagcaatttgatcttgaacgactttacgtggtaaatcaacacgttcaaatgaccagtttagaattgttacaggtccagttaacatacctttaactggtttatctgttaagctttgtgcataaactgtttcatcaacagttaaaggcgctgtccattttacatcaccataaatgattggtggttttacggcacgtgaaccatatgattgcacccaaccgaatttagttactaagaaaccttgtaatttttctccgaagaattcaaccatgtcattacgttcaaattcaccgtgaactaatacatctaagccaatgtcttcttgaattttaatccatcgagcaatttcattttttaagaatgtttcatatgcttcgtctgtaatgcgtttgttcttccaatctgcacggtattttcgaacttctcggctttgtgggaatgatccaatagttgttgttggtaaatccggtaagttcaaacgtttttgttgttgttcaatacgttgcgcgaatggtgattgtcttgaagtacgcacgctttcgaaatcataatctaagtttttgaatgattgattttggaaacgctcataacgtgcttttaatttatcatatttaacactatcgttttgattaaataggcgacgcaatgcatctaattcgtctaatttttcagttgcaaagcttaagccttcgccaacacttgtatctaatgtttcatcatctaaagatactggaacatgtaataatgaagatgatggttgaatgacaagttcattagtgtgtgctaacaatttatcgattaagacttttttagcttcaatgtcacttgcccatacattacgaccatcaataattccagcgtataatgtttttgatttatcaaaatctccagcttcaatttgtttaaggttatagccattatcatggacaaagtctaaacctataccaccaacaggtaaagaacttaagaatttaagatgtgcacgttcaaagtatgtttgaatgactaattttttagcaacaccagctttttcgaaatagtcataagcttcacgtgtaatattttcatagctttcgctgtcgtctgtaactaagattggctcatcaacttgaatgtactcagcacctgcatcaattaatgattcaaacacttctttataaagtggtaataacgttttaactttttcttcaaaagtttggtgaccgccttttgataatttaacaaaagtaatcggaccaacaatgacagggtgagcgttaacgtttaaagattgggcatatttaaagcgatctaataatacattgcgactcactttaggctcaacattgtcccattcaggtacgatgtaatgatagttagtgttaaaccattttataagtgcacttgcaacatggtctttattaccgcgagcaatatcaaataataaatcatcatcaatagttcttccttggaaacgttcagggatgatgttgaataataatgacgtatctaatatatggtcatataaagagaaatcaccaactgggatgctatctaagtgatagtacttttgtaataataaattttctttatgtagatcagttaatgtttgatctaattcttctttagaaatcttctttgcccaataactttcgatggcttttttccattctctttttctacctaatcttgggaatcctaagtttgatgttttaattgttgtcataatattgcctccttgtgagcagtaatagattttgagtatgctgcaagttctaatgaatcttcgacattttgaaacggtgtgataatgtataaaccattaaaatattcatgaacagtatcgattaaatcctttgaaagcttaagacttagttctcgtgttttggctttatcatctttaactgcttcaaattgttgtaaaatttcatctgacatcttgattcctggcacttcattatgcaaaaagagtgcgtttttgtaacttgcgataggcataatgcctatgaaaaatggtttgttcaagtgcttagtggcatggtaaatttcaatgattttctctttgctgtacacgggttgtgttataaaataagacattccgctttctatctttttctctaatcttttgacggcaccatataatttacgaacattagggttaaaggcgccagcgatgttgaagtgtgtacgtttcttcagcgcatcaccgtcagtgttaataccttgattaaatcttagagcgagttcagttaatcctttagaattaacatcatagacattggttgcacctggtaagtgaccaacttttgaaggatcaccagttatggctaatatttcgttaacgccaatgagcgataatccaagtaaatgggactgcaagccgattaagtttcggtctcgacatgtaatatgtacgagtggttcaatattgtaatattgcttaattaagctagcagcagcaatattgctaattctgacagttgccaatgaattatctgcgagtgttaccgcatctacattagctttatcaagtttagcgatattttcaaaaaatctatccgtgtctaaatgtttcggtgtatccaattcgataataacggttggacgttcttgaaccttagatgttaatgattgtctaactttattttgagatggattgaaaagtgctttcgttggtatcggaatcacttttttgtcattaacaggtttaagtgtctgaatagattctttaataaatttgatgtgctctggcgttgtaccacagcaaccaccaattaaacgaacaccttcgcgaattagattttgagcaacttgaccgaaatattgtgcattgtcactatacttaaattcactattttcaatatctaataagctggcatttggataacaagataagaatgcgtgctctggtaattcaatatgtgtgaaagactcttgcatatggtgcgggccatgatgacaattgagtcccacgatgtttgcaccacattgaacgagttgttttaatccttcattgattgcctgaccattaactaagtaatttgtgtttgaagcggttaattgagcaatgattggaatgtcgtatttctttctcgttcgtgaaatgacatttgttaactcttctaggtcgtaatacgtttcgaaaagtagcgcgtcaacgccttcttcaattaaggtgtctatttgaatttcagtatgataaagaatagtttgtaagctgatatcctcttgtttgatacctctaaacccaccaactgtgcctaatatatacgtatctttatttgctgctttttttgcgatgcgaacggcggcttgatgtattgctttaactttatcttcaagaccgaatcgttttaacttttcaaaatttgcaccataagtattggtttgaatgacatcagcaccggcttcaatatatgaacgatggatgcgttcaactttatctggatggctaagattatatgcttctggacaggtgtctaatccttcagagtataaaatggttcctatagcgccatcagctactaaaacattatctttcaattgtgtgaggaattgactcattgaatgcctcctttaatgcgtatttgatgtctgcaatgagttcatcaggatcttcgagaccaacacttaatcggaatagaccgaaagtgataccacgttcttgtctcacttcttcaggtagtgcagcgtgagacattgttgctggatgtgaaaggatcgtttcaacaccgcccagactcactgaaacgagtggtaatgtcagtgcatcgacaaattgttgtgctttagactcatcagctaaacgaaagccaataacggcaccgccatttttagcttgttctaaatgagcagtagtgagtcccggataataaacttctgaaatttcatcttgctttattaaaaatgacacgattttttgagcgttttcgacagattgtttaaatctgattggaaaagtttttaaatgtttagcaagtgtccagctatcctgagcagataacatattgcctgtaccattttgtattaaataaagagcgtcactaattgcctcattattagttatgacagcaccagcaattaaatcgctatgtccacttaaaaattttgtagcactatgaatgacaatatcagcgccaagtaataaaggtgattgacctaacggtgtcataaatgtattgtccacagctaccagtagttcatgcttttcggctattttagaaacagctttgatatcagtaattttaaaacagggattcgatggtgtttcgatataaattaattttgtgtttgattgaatggcaccctcgatttgttcgagctttgtagtatctacggttgtaaattcaatattaaatcgattcaaaatttgctcagtgaggcgaaaagtaccgccatatacatcatcgggtaagatgacatgatcaccagatttgaaagtcaaaagtactgctgaaatagcagcaatacctgatgcaaaagcaaaagcgaattttccctgttctaatcgtgctaacttctcttctaaaagttcacggttagggttgccacttcgtgcataatcatatttaacatcgccaccaagacttgtttgatggaatgttgaagaatcatagagtggtgggttagctgaatgatattccacacctctacgccaatcgaatatcacttctgtctcttttgaaagtgtcatacaatctctccaatctgagctttatctaatgcttggatgatatcgcgttcgatgtcttcataattttcaacacctagtgataagcggattaaatactcatcaatgccacgtttatctttttcagcatctggcatatcaacatgtgtttgggtgtaagggaaggtcactaatgtttcagtacctcctaaactttctgcaaaaatgcaaatgtctaaattttctaataatttagcgacgctataggccttgttaagtcttaaactaagcatgccagtttgcccgctatatagtacttcgtcaattgcttgaagtgactgacattttttagcaagttttctagcgtttgattgcgcacgctcaatgcgtaaatgcaaagttttaagtccacgtaacaacaaataactatctattggtgaaagtgttgcgccagtcatgttgtgaaaatcaaacaactgttgcgcgagtgattcatctttgacggttacgacacctgctagtacatcgttatgtccgccaatatatttcgtggctgaatgtaagactatatcagcaccttctgctagtggtgttgaaagataaggtgttaaaaaagtattgtcgataattgacaataagcctttagctttacaaagttgatagtatggctttacatcaatagcaatcatttgtgggttagatattggttcaatgaataatgcaactgttttatcagtgatttctttttcaacttgttcataatctgtaaaatcaacgtacttaaatttgatatcgtattgttgctcgtaaaattcaaataatctaaatgtgccaccatataaatcgaatgaaactaaaatttcatcatgaggtttaaatagattacatattaattgaatggctgacattccacttgatgtagcgaatgatgcaataccatgctcaagtttggcaaaacaggtttcaaatgttgagcgtgtaggatttttagtacgtgtataatcaaaacctgtcgattgtcctagttttggatgcttgtaggcagtagataaatggattggattcgctatagcaccggttgaatcatcggttaatgtgatttgggctaactgtgtatccttcatattaagaccctcctataagaaaaaataaaaaaagcttccgtccttcgtacccgaatgaatcggataaaaaggacgaaagcttatgtttcgcggtaccacctttatttgttattccatcgctgaaataaccttattcagtacgcattaaaagtaaatatgcttactgaacaattatcacaattaaagtcagtaagtaaggatatagtaatgtgctatcccatacttattaacaaaaaatcgtgcgtaaagaatccagtacgccatttaacatcaatgttaatactgtatcgctataacgggcgaacccgtagacacctcatattggcatcaacactccaaggccattttcaaacacgcttttaaaatcttctctcagctactaaagactctctgtataagcagggtgtgttttactttcctctttattgtgtttacgtttcattaaactgttataagatattaattagcttacagagtaaaaaaagatttgtcaacaattattcagaaaattttgatttaaaagttaatttgtttgtgaaattgtaattggtatcttgaagttgaaaaatgaattattttttaaataaagtgtggttaatggttgtctgactcatttagaatacataaaatatatttaactgttgttatcaaataaaaagtgatgtgagtgaattgtcaaaaagtgaagatcaacgtattactaaaacaaaagatgaacaaattaagcaaatagatatatcggatatcaaaccgaatccgtatcagccccgaaaaactttcgatgaaaatcatttaaatgatttggcagattcaattaagcaatatggaattttgcaaccaattgtgcttagaaaaacagttcaaggttattacattgtagttggtgaaagaaggtttagagcttcgaaaattgctggtctaaaatacgtatcagcgattatcaaagatttaacagatgaagatatgatggaactggcggtcatcgaaaatttacaacgagaagacttaaatgcgattgaagaagctgaaagttatcaacgtttgatgacagatttgaaaattacacaacaagaagtagcgaaacgattgagtaagtcgcgcccgtatatagcgaatatgttgaggttattacatttgccgaaaaagattgctgacatggtaaaagatgggcgactgacaagtgcacatggacgaacgttattggcaattaaagatgaacaacaaatgcttaggttagcgaaacgggttgttaaagaaaagtggagtgtcagatatttagaaaaccatgttaatgaattaaaaaatgtttcgtcaaagtcggaaacagacaaagtagatataactaagcctaaatttataaagcagcaagaacgacagttgcgagaacagtatggtaccaaagtagatatatcaataaaaaaatcggttggtaaaatctcatttgagtttgattcacaagaagattttgtgagaataattgaacaattaaatcgtaggtatggtaaatagttacacaattttatataataactctttgtgcaagtgtaaataaattgtaatcagtgaacatttgattctagatatattgagactttcgtaggttggaagtatataaaaatatgaatacaatattgatatatcatatagaagggagtaacgcttatcatgaatcaagtcatgaatattatttcatctctatttgagccattaacaaaaatagaaacatatgaaaacattgcaactaaaatcgctatgattgttatttatattatcgtagccctcatagttattaaaatactgaataaaatgattgaacagggatttaagattcaaaataaaagtaaaaagagtaacaaaaagcgctctaaaactttaatatctcttgttcaaaatgtagtgaagtatatcgtttggtttatagttattacgacgattttaagtaaatttggcattagtgttgaaggggtaattgccagtgctggtgtcgtaggcttagcagtaggttttggtgctcaaactatagttaaagacgtaattacaggattctttattatatttgaaagccaatttgatgtaggtgattatgttaagataaataacggtggtacaactgtagcagagggaacagttaaatcaattggacttcgttcaacacgaatcaatacaatttcaggagaattaacaattttaccaaatagtagtatgggtgaaataacgaactactcaattacaaatggtacagctatcgttaaaattccagtgtctgtcgaagaaaacattgataatgttgataaaaaactaaacaaactatttacttctttacgtagtaaatattacttatttgttagtgatccggttgttattggtattgatgctattgaagatacaagagtaatattgagaatatctgcagaaacaattccaggtgaaggatttgctggagctcgaattattcgcaaagaagtacaaaaaatgtttttacaagaaggtattaaaacacctcaaccaattatgactgcttataatcatagtgaaaacggtgtttagtagtttataatacatggaggtcatatttaatggcgtcaaaatatggaataaatgatatagtagaaatgaaaaaacaacatgcgtgtggaacaaaccgttttaagattattagaatgggtgcagacataagaattaaatgtgaaaattgtcaaagaagtattatgattccacgtcaaacgtttgataaaaaacttaaaaaaatcatcgaatctcatgatgatacacaaagataggagaatgattaatggctttaacagcaggtatcgttggattgccaaacgttggtaaatcaacattatttaatgcaataacaaaagcaggtgctttagcagcgaactatccattcgctacgattgatcctaatgtagggatagtagaagtgccagatgctagattacttaaattagaagaaatggttcaacctaaaaagacattgccgactacatttgaatttacagatatcgctggtattgtgaaaggtgcttcaaagggagaagggttaggtaataaattcttatcacatattagagaagtagatgcgatttgtcaggtcgttcgtgcatttgatgatgataacgtaactcatgttgctggtcgagtagaccctattgatgatattgaagttattaatatggaattagtactagcggacttagaatctgttgagaaacgtttgcctagaattgaaaaattagcacgtcaaaaagataagactgctgaaatggaagtacgtattttaacaactattaaagaagctttagaaaatggtaaacccgctcgtagtattgactttaatgaagaagatcaaaaatgggtgaatcaagcgcaattactgacttctaaaaaaatgctttatatcgctaatgttggtgaagatgaaattggtgatgatgataatgataaagtaaaagcgattcgtgaatatgcagcgcaagaagactctgaagtgattgttattagtgcaaaaattgaagaagaaattgctacattagatgatgaagataaagaaatgttcttagaagatttaggtatcgaagaaccaggattagatcgattaattagaacaacttatgaattattaggattatcaacatattttactgctggtgtgcaagaagtacgtgcttggacatttaaacaaggtatgactgcacctcaatgtgctggtatcattcatactgattttgaacgtggatttatccgtgccgaagtaacaagttatgacgactatgtacaatatggtggcgaaagtggcgctaaagaagcgggcagacaacgattagaaggtaaagaatatattatgcaagatggcgatatcgttcatttcagatttaatgtataaacgatagagtgaagttaattaaatagtatatatgtagaagaggcggaatcaattgttcgcctcttttaattatgcgtataatttattaaaagaatggaataattttactcgcgttaataatatcttgagtgctgaaaaattgtttgccttcgccagtataagcaggctctaaaacaagattagcctttgcacaataaagccattcaggatgaataccactattaagtatctcttggaattcttgaaaatctttagaccaatcaatatttaaattcattccttaccacctcacaactattatagaacatatgttcgcttttgtgaagtgtatttttaaaaatatcatagaaagtttcaaatgaattaatatcaaaaatgatatgaagagtagtttgaattattattgtaaaaagtaatggcgcatgatataattctttattgtgagtaatgaaaattattccttgcttatctgttttaagattgataagccgtatagaccacaaggaggtgcaaatataaaatgagaacatatgaagttatgtacatcgtacgcccaaacattgaggaagatgctaaaaaagcgttagttgaacgtttcaacggtatcttagctactgaaggtgcagaagttttagaagcaaaagactggggtaaacgtcgcctagcttatgaaatcaatgatttcaaagatggcttctacaacatcgtacgtgttaaatctgataacaacaaagctactgacgaattccaacgtctagctaaaatcagtgacgatatcattcgttacatggttattcgtgaagacgaagacaagtaataattagagggggcgtttaaatgctaaatagagttgtattagtaggtcgtttaacgaaagatccggaatacagaaccactccctcaggtgtgagtgtagcgacattcactcttgcagtaaatcgtacgttcacgaatgctcaaggggagcgcgaagcagattttattaactgtgttgtttttagaagacaagcagataatgtaaataactatttatctaaaggtagtttagctggtgtagatggtcgcttacaatcccgtaattatgaaaatcaagaaggtcgtcgtgtgtttgttactgaagttgtgtgtgatagcgttcaattccttgaacctaaaaatgcgcaacaaaatggtggccaacgtcaacaaaatgaattccaagattacggtcaaggattcggtggtcaacaatcaggacaaaacaattcgtacaataattcatcaaacacgaaacaatctgataatccatttgcaaatgcaaacggaccgattgatataagtgatgatgacttaccattctaataaaaattaacgaaattaaagcgaaaaaattatcaaaggaggcacacaatcatggcaggtggaccaagaagaggcggacgtcgtcgtaaaaaagtatgctatttcacagcaaatggtattacacatatcgactacaaagacactgaattattaaaacgttttatctcagaacgcggtaaaattttaccacgtcgtgtaactggtacttcagctaaatatcaacgtatgttgactacagctatcaaacgttctcgtcatatggcattattaccatatgttaaagaagaacaataatatataatttattgtcaaaccccgtaggcataggcttacggggctttttgtgttttggggtatagaaaaagggcaaaaaaggatgatgtgaatgttttgtgttcggaatttgcacaaagatatgtttatattgcaaaaataatatgaatttagatgcataaaaaaagaactacgcattttaaataaaatgcatagctcttctttttcttgcatacgaattaaaataactcgcgagacctataagtctctttcctcactagatagtttatacttttggtctgttgaagtcaataattttatctaaagctataaaaaatcttttgatagctaatgcattattataatagctttcgtttcttttatatcgcttttgaagttggtccaaatcgtgatatcttgcttggataattgcattactacaaacttgattatgtaattctagcgtagcgaaagtatctatgaaattttttattccgaacatgtttctagatatgcctatattattccctttttcaaataaatattgaggtaatctactgtcataatttagatttgctatgatgggttggttatgagctgatttgtttcttatatttttaactaaaggcattaaaatattagcaactctcaattcttcgtcattgtacttcttgtaatagaagttgagaaacgaaacgaattgacctagttgcatgaattcaatgcaaacccatgcgggtggattttgatagtatttattcaacttctcgggtagttgtcctcgtttattcatatgcttgaatatttcgtttttatttttgattttggtttccataacttcttctggtgttcttgaatttgtgtcaaaatttgaattgctatatgatttatcaatacataagaactcatctattattttataaccatcttcttggttattttctgttattagttttaagactagatactttaaactatgttcaatatctaaagttaaatgcaacattgtgtatcttaatttcatatctatagttgctaaatctgataaataagcaaattctatgaaatagccgccattctttttttcgaaattttttcggaaataagctagtttgaagaagtaattattttttctaagaatttcatttgctttttcggtgtcaataatattaaaaaatatattcatctgttttaatttcgctatttgctcatcaaaattgagcataggcttaatttctgctagtgtatcatctttttccaattttaactccccaatcgttcaaatttattcatcatatctttcgccatctgattagtaacatgtgtgtatatctctagattttttttataatctgaatgacctacatgctcttgcattgcttttaagttaattcctaattgagcaagtgtagatatatgcgaatgatgtaatgtatgcgtcgttataggtttcttaatagaactaatatcagcgcccccctttaataatgtggctaattttgttcgagtcgatagggctaccagacgtatttgtgaatatgtactctctatcaataaacttatcattccaagcataagtgttcttagtaagtcgatgctttgggtagtgagccctgtggccttatagctattacttctttcagttgtctcctttactccgaatgctcccgtcttttttcagttatccaattaactttaccgtcgatatctagcgttttatcttcatagtttatatttactctctttattgcaagtagctcaccgatacgcatgtcattagcaatttgaaactgtaccatagcttttaccattttataattacgttttgtcgttggatatttttatacttaattacatagtcgaaacaatccagtaactccttaacttcattatcttctaatgtgttattatgtttagctagtaacgcatcactatagggatatctattttatctattacacatataactttgaattgcttgctattttaaattaacaaattttattctcttagattttgtccaattatgtgtagacgatttatagttattaaattcagagtggtagcaaattaaagttaatcaagagttaagatgaatttaattcatgaacacgtctattatttttataattgtagcaaataaagctttacatcaaggaggtaattaaatatgttcaaaaaatatgactcaaaaaattcaatcgtattaaaatctattctatcgctaggtatcatctatgggggaacatttggaatatatccaaaagcagacgcgtcaacacaaaattcctcaagtgtacaagataaacaattacaaaaagttgaagaagtaccaaataattcagaaaaagctttggttaaaaaactttacgatagatacagcaaggatacaataaatggaaaatctaataaatctaggaattgggtttattcagagagacctttaaatgaaaaccaagttcgtatacatttagaaggaacatacacagttgctggcagagtgtatacacctaagaggaatattactcttaataaagaagttgtcactttaaaagaattggatcatatcataagatttgctcatatttcctatggcttgtatatgggagaacatttgcctaaaggtaacatcgtcataaatacaaaagatggtggtaaatatacattagagtcgcataaagagctacaaaaagatagggaaaatgtaaaaattaatacagccgatataaaaaatgtaactttcaaacttgtgaaaagtgttaatgacattgaacaagtttgaaattaagctaaattagtatatatagtgttttatcgctaatactttgaaagttaggtatctaaaggtgcctagctttctttgttatgattagcaccatcatatagaaaattctttaatgacgtttatgccgaaatctacaaaaataatttctcttttatggttaatcaatatgtttttacattcgacaaccttaaaattaacttctttcaatttcataataaagtctctataaaataacttagtttaaaaacgattcgtatctttcagattcaaataccatcattttctcctaatacttacactttaattacaattatgtaagttgttttcagatacatcctattttatattttgtcagaggtgatcttttgaaaacgattttaaaaacaataacatatcttgtacttactatcattggcgcttatgctgctttattcattttaaaaacaatagactcccatggtataacagatcaatttaacccattagtaaagaaggatgattcttatgttaaaacgacagaggtgtctactagaatggatgatcaactccgaagttatagtcaaagtgtttttaataaagaagggaaagagacgcaattaatgtatactgctacatttgatgttaaaccgcatagatacttgaaaattacacataaaggtcatcatgtagaaacttttgaagaagttgaaaaggaagaagtaccaaagaaagcattagacaaactgagtcgataatagcatgcttatattacatggttcatttataaaaggagtacgaacgaaagtaacgcatgacgattaatttaaaaatatttgtaataattatgaataaaattaaaaacaaggggtaatacaatctatatagcatataagcttttgttatgagtttcaaaaataggaagagagagtgatattatgaaattaaaatcattagcagtgttatcaatgtcagcggtggtgcttactgcatgtggcaatgatactccaaaagatgaaacaaaatcaacagagtcaaatactaatcaagacactaatacaacaaaagatgttattgctttaaaagatgttaaaacaagcccagaagatgctgtgaaaaaagctgaagaaacttacaaaggccaaaagttgaaaggaatttcatttgaaaattctaatggtgaatgggcttataaagtgacgcaacaaaaatctggtgaagagtcagaagtacttgttgctgataaaaataaaaaagtgattaacaaaaagactgaaaaagaagatacaatgaatgaaaatgataactttaaatatagcgatgctatagattacaaaaaagccattaaagaaggacaaaaagaatttgatggtgatattaaagaatggtcacttgaaaaagatgatggcaaacttgtttacaatatcgatttgaaaaaaggtaataaaaaacaagaagttactgttgatgctaagaacggtaaagtattaaagagtgagcaagatcactaaaaagattcgttgcattaacgcttgtaaaatgtcttaattcatattaattaataaaataccctcacaacgtaatgtaatatatccagtatagatttgaaaggatatatgccaaacgtgttgtgagggtttatttgcatctatttatccatgcgaatatcgacttcttctaaatgtttctgatattctttaaccttactttctaaaaacatttcatatggtgcatcaaagaagtcagctaaatgcatggcatctttaaatttaggttcatggtgatgattctcccattcccaaatttgatgtgcttcatatttagtaccatatttctcatttaattgctgtgctaattcgtcaatttctaaattatgtttagttcgtaagttatataaaatatgcatattcattgttcattaacctcgcttcttgatttaaaattcaaagatgctctaataatatgtgtatattctagtcctataacataaaataatcaagctatgaattcggcagaaaaaataatgtaaatgtatatgatattatcggtacagagactttaaataacgatagctacattgaataaaattgatattcaattactacttttaaaaatatttggataaaaataatttgaatttgttttagaattgtaaataaggggtactacttagaataacgcaaaataaatagaaaaaggagactgaaaattatgtttggatttattggaatgttaattgtcggtggcttaattggatgggctgctggtgctattatgggtaaagatatcccaggtggtattttaggcaatattatcgcaggtattattggatcatgggtaggtggcaaactattcggacaatggggtcctgaattaggaagtatttacatcttgccagcattaattggttcaattatcttaattgcaatcgtaacgttaattttaagagctatgcgtaaataataaaaaaattcaattggaaattgaaataaagatggcattcagttgtcatcttttttatttgcgtgaaaatggtcaatatgtattataatatttgaaaatgtagataagataggattaaaaagtaataaattaatatgaggaaattttggaaataaaaaagcgagtatttgacaaataaaaaaaggatgacgttgggttgcgccatccaggagtattatgttcatgaatataaaagactgtgtagtcatttaagaactacacccatatagtaacacatcacttgattaaagacaatactatttttagagtcattaatttaaaatatgaattaattctttttttagaatagaatattaagattgatatcgaattagtagtcaaagtgttatggtagatatgaaatacataaggtaaggagtaatattatgacgatttatttagttagacatggcgaatcaaaatcgaattatgataataaacattttcgatcttatttttgtggacaattagatgtgccgttaacggatactggcacaaaaagtgcagacgatttatgtgattattttaaagagaaacagattaaacatgtatatgtttcagacttattaagaacacagcaaacgtttgaacatatttttccatatgacattgcatcaacgactacccctctattaagagaacgttcacttggcgtatttgagggtgaatataaagatgaaatcagtgcgaatccgaaatatgaaaaatatttcaatgatccaaactttaaagactttcgtcatagtttttcacaaaaagcgcctgaaggagaaagttatgaagatgtatatcaacgcgtagaacattttatgaatcatgttgtcaatgaagatacacaaaaagatgatattgtcattgttgcacatcaagttgtcattcgttgtttgatggtttattttaacaaagtttcaagggcagaagctgtggatttaaaggtagaaaattgcaaaccatatatcattgaatagaagtatagaggttctgaaaaactgtgttttatagcggccttcagaacctttttttcatttggaatttaaggggaatcattcttttcaacagacttaccaccaatggctaatgtgataattgtgcttgtgaacaaaataattgaagttataaatgacgctaatgtaaaaggtgtaaattgtgtgagcgataatatcaatgataaaaagaaccaagagatagcccctagaaattgtaaaatagcagaagaaattctaaaactcatataatcatatatagctaaaacaagtgaaggtaatgcgactaataccattataatgatgttgagggtgaataaatatggctgttcaaaagttactgtgtttggtcctgttggatgcattgctgctaagaacaagcaaacaatcgtcgataaaattgctaaaataataaaagtaattcgaactttcatcatgatcatcctttgtttatagagtcaatataagtatggaatatgttaggtatatagtcaaatgcgtcaactaatgggaattttggcatagatagagaatttaaggcaattaaaaaggcatcaaacagtaatatgctgcttgatgcccaaatgatgactttagctaaattgattagtcacttttaaagataaagaattgtcatgaattaaaactcatgtaatgatgtgttacatttcgcaatgatggctttcagttatttatcgataacatcactcttgatacctttagattttaagaaatctttaattttatcttgttgctttttattaacatcaccggcatattttgttggcacgtcgacaacattgattttattttgcggttgatagctaagcttttcaatatcttcatcaacattggcgattgtactatttaaagctttgaagtaattcatcattaattcaacgggtttcttatattctttaggaatattgttttcagtgacaaatttcttgaaatgcaaatcgtttttaacagctaagttagataagtggctaagtgtttctgcttgtttttcagtcacttttgtttgactgtcaatttgtttatctagtttatgttgcataatatatttgttatcaagtatatcgctatttacagacaaatacttttctatagcttgcttcatctctgcatcactaatatcactatttttcttatctgagttaaagatatcttttgtttctaattttttagcgcttttaggtgcatggatgccagtacttgtatgatgatcttcgttatcagattgatcggacgcgcaacctgtaagaattaatgtcgatgctaaaaatgtacttagtagtaatctctttttcataatgtaatataactccttagtttatctttaattgaaaaaatatgtattcatgtttaatagagtaacattgaattagtttggaatgtcacgatgaccttgcaatgaccatagacgtaaatgattacgtgcatgagttgctttttctatcaataatgcatcattttggacgttgttaaggatagctttatctataaataactgcataattggttgtactaatttagacgtaggtatcgtacgtaaaagcataataatttcgttcacatacttttctttctcaatatcatttttcatattgatttgtttgcgagaggtacatactttaagcattatcgcacatctcgttgtatatattaagtttatcataacatgattttatgtcgggataaaaaaataacagcatcttaacaaatgtaagatactgtcagtgaaatgaatgaaactttagtttctgataatatagtcaaaggcatttaatgctgcatttgcaccagcgcccattgaaatgataatttgtttgttcttctgatctgtgacatcgccagcagcaaatattccaggaacattcgtattattgttacgatcaatcacaatttcaccacgttcgtttaattcaacagcatcgtttaaccatgatgtgtttggaagtaaaccaatttgaacaaagataccatctaagttaagtagatgttcttcgccggtgttcatgtcttcgtaacgtatacctgtaacatggtcttctccgacaacttcagtagttttggcatttgttttgatatcaacatttgataaagaacgtaaacgatcttgtaacacgttgtctgcttttaattcgctagcgaattcgaataatataacatgattaacgataccagcaaggtcaattgctgcttcaaccccagagttaccgccaccgataactgctacgtctttattttcaaatagaggtccgtcacagtgagggcagaatgcaacacctttattaatcaattgctcttcacctggaatgtttagcttacgccaacctgcaccagtagcaataatgactgttttactttctaagacagcaccgttttctaacgtaactttaattgcttcgtcagtcttttcgatatctgtagcacgtatacctgtcattgcatcaatgtcatattgatcaatgtgcgctgctaagttagaagaaaattcagaaccagttgtttctttaacagtaatgaagttctcaataccagcagtatcattaacttggccaccgatacgatcagcaactataccagtacgtaaacctttacgtgctgtgtaaatcgctgcactaccactagcaggaccaccaccaacgattaagacatcataaggttctttattttcaaactcagatgcatctgccgtactgcctagtttcgaaagaatatcttggattgtcatacgaccattgccaaattcttcgccatttaaaaagacagcagggactgccatgatgttttcagattcttcacggaacactgcaccatcaatcatagaatgcgtgatgttagggttgatcacactcattaagttaagtgcttgaacgacatcaggacatttttgacacgttaaactaatgaatgtttcaaaatggaatgaaccttctaattttttaatttggtcaatgattgactgtttttctttaggtgcacgaccactaacctgtaaaattgctaaaacaagtgagttaaactcgtgacctaatggaatacctgcaaatgttacacctgtttcttcgccaggacgattgactgagaaacttggtgtacgttttaaagatttttcagaaagagatagtctaggtgacatatcagtaatttctgtcaacaaatctttaagttctttggatttatcatctgaaccaaggctggcaacgaattcaacgttgccctccattagttctaatagttgtttaagttgttgttttaaatcagcattaagcatggttgtaatgcctccttagattttacctactaaatctaaaccaggttgcaatgttttagcgccttcttcccatttagctgggcatacttcgccagggtttttacgaacatattgagctgctttgattttgtgagctaatgtactagcgtcacggccaattccgtcagcgttaatttcagatgcttgtacaacaccgtctgggtcgataatgaatgtaccacgttgagctaaaccagtagcttcatctaatacatcaaaattacgagtgattgtttgtgatgggtcaccaatcatagtgtaagtgattttgctaattgcatctgaatggtcatgccatgctttgtgtacgaagtgagtatcagttgatactgagaatacatttacgcctaatttttgtaattcttcatattggttttgtaagtcttctaattcagttggacaaacgaatgagaagtcagcaggatagaagcatactacgctccaagaaccttttaaatcttcttgtgtaacttctttaaattgatctttttttggatcgaaagcttgcgctgtaaatggtaagatttctttgttaattaatgacataaatatcttcctcctaagaatttaagtatgaattagaactatcaattgattgcgcttaattataataattctaatctcttagttagcattattacattttgatccagaatagtcaactggataactttgtaaagtgaatgattacttttaaaataaagaaagataatataaagtgctttgataatggattttgtagttgatgatttaaaaggttgtgtctatatttaatatcttgattttaatgtaaaaaatgtaaaaaaagaagatttgtattctcaactaagtcaaccttattgataatggtgtgagaatatttgttcgagatggatgaaggtaatgagtgagaaactggatttttaaagtatgagacaatattttaaaaagttcaattattaacttataagcaaataattgctataaaaaagtttggacgtgtacaattgcaatatgaagattttaaattaattgtaaagtatcgaggagtgggtaacgtgtcagaacatgtatataatcttgtgaaaaagcatcattctgttagaaaatttaagaataaacctttaagtgaagacgttgttaagaaattggtagaagctggacaaagcgcttcgacgtcaagtttcctgcaagcatactcaattattggtatcgacgatgagaagattaaagaaaatttacgagaagtttctggacaaccttatgttgtagaaaatggctatttattcgtctttgttattgattattatcgtcatcatttagttgatcaacatgctgaaactgatatggaaaatgcatatggttcaacggaaggtttgctagtaggtgcaatcgatgcagcattagttgccgaaaatattgcggtaactgctgaagatatggggtatggcattgtctttttaggatcattaagaaatgatgttgaacgcgttcgagaaattttagacttacctgactatgtcttcccggtatttggtatggcagtaggggaacccgcagatgacgaaaatggtgcagccaagccacgcttaccatttgaccatgtcttccatcataataagtatcatgctgataaggaaacacagtatgcacaaatggcagattacgaccagacaatcagcgagtactatgatcaacgtacaaacgggaatcgcaaagaaacatggtcgcagcaaattgagatgttcctaggaaacaaagcaagattagatatgttagaacaattgcaaaaatcaggcttaatacagcgatagcaagataccaaaataacccgcccccctctagcttaaaatgataagtatagctagagggggcgggtatttcttgcaatgaattagtgtgaagttaatgcagtattatcatttgaatcgaaagtatctttatcccaatgtttagttaacttggcggtacctgtaccagctagcattgaatcgttcacgtttaatgctgttctacccatgtcaatcaatggttcaacggagatgagcacgccggctaaagcgactggcaagtttaacgttgacaacaccaatatggatgcaaatgtagccccgccaccgacgccagcaacgccgaatgaactaataatcacgacagcgattaacgttacaataaattgtaaatcaatttctacattagcgacgggtgcgaccataattgcaagcatggcagggtaaatgcctgcacaaccattttgtccaatcgacaatccaaatgtcgcagcgaaattggcaataccttctggcacgcctagacgtcttgtttgtgtttgtacattcaatggtaaggcacccgcgcttgagcgtgatgtgaatgcaaagattaatacttccaaagtctttttaacatagcgaattgggctaatacctaacaggcttaaaataattaagtgaatgatatacatcgtaattaatgcagcgtacgatgcgattaagaattttcctaaagtccaaatggcgccaaagtcacttgtcgataatgtgttggccataattgctaatacaccgtatggcgttaaacgtaagacgaacgtcacaatcgccattactagtgaatagatagcgtcaatcgcacgcttaagcaattcaccatgatcaggttgtttgcgtgctacgcgtaaataagcaaatcctataaacgaagcaaatatcacgacagcaatcgtggaagttgcacgttgtccagtgaaatctaagaatggatttttaggcaataattccaaaatttgttgtggtaacgtatgtgctgttaaatctttcgcttgtttagcaatttcgcttccacgtgcttgttcagcgttaccaaggttaattgttgatgcatctaaaccaaacaccaaggcatacacaacaccaacaatcgcagcaatggtgacagtgccaattaaaaagataaaaatgagactaccaattttagcaaacttttctccgatttgaattttagtgaatgcagctacaatagaaatgaaaattaaaggcataacaatcatttgcaacaatgcaacgtaaccttgtccgacaatgttgaaccagtcacttgttgatgtaataacattcgaatgtgtgccataaataagattcaataacacaccgaatactataccaatccctaaagctgtaaacacacgtttcgcaaaagatatatgtttgcgagccatcatgtgcaatattacgatgaaaatcaccaatacaataatattaatcagtgtaagaaaagcattcatgaacgtcactcctcaaatttttgaatataattctgactagtatgctaagaataatattaattttaaaatatttcaagagggcatttgcaattaaatgtaaacatgatgaaattcgaccgttggcataaggggatttgtaaacaaatcgttttgaattcagtagtgataggtggaaagggtaaatagtgtgatgagctagtcgattaaagttaatatttgaaaatgaagcagggcattaaatgcaataaattaaataagttgtcattaaagcattaataatagaaatgattttaacaggaaaaaagtgatgaatatttggaaaagatatatatcgtgcactgtcatgagagataagatatgagaaaacaaatttatccttgaatcgagatgtggctatggcggtttgataaaaattgctaacctcatatttattgaatgaaaagataataaatgatcaaccttgaaaagacgtttcgaacaaacacgttgtaaaaaattctgtcgaatcaaaattagcatcttttgagtgttcgtgtgtgcaggtggtagttcaaaagctaccgtaaacaaatatttttgtttgagcaaaaaggcgtttgtagtaaatgtgaatatgagtgtgcacttgtgcgattcgtcagttactaacacagccaaacatttaaattgaatggacttattaagatgaatctatttagaagtacacagaagccatcccatttaaaagtaacatactataaaaatttattcaaaattcaatattaatcataatgaataattaaaaaacctgaaacaaattagtttgatatgctctcttcaaagtagatattgaatggagtatatcagcttgtttcaggttttatgaattgagtattaaatttgaaagtaaattacagttctataggtttataaaaatcagtttttaaatcaaagctatatatgaattgagtattaaatttgtgttcaaatcacaagtttacaggttgaataaacgtgcgaagaaaccttttttctcttcttgaggttttggttctgacatttctgactgtgaagctgtgctgtcattttctgctttcgcttccaatgaatcgttcgaagtagcttgtttagaagcttctgcatgggcttctgctacttgttgttcagcatcatgttgcgcttctgcatctactgtagcttctttatttgaagtctcagctgcattgtcatttttagactgctcaacgctggctttttcaattgcttcagttgcagaaatttgatcctctttatctactttagtagcagtgccatcgcctgcattttctgctttagtatccgtcttagcgtctgttgatgtattcactccagcaaccttcgaatctttactgtcagctttatcttcagtaacagcattcttttcaactttatttgttgattcagctaatgcttttgcttgagaggcttgcgcttcttggatagcctcttgtgatgtttggatggcttttaaggattcgctatttgaatcgattttagatgtaagttgattttgaagttcttttaattcttgttgttgctgatgtacttgattcatcatttgaccaagtaggtgacgttcttcgcgcattttctggatttctaggcgtaaatcttctactagttgagcgacattttgattagtaggtaagtttttgtcatcgtttttgacaatgacttgcaggaagtctttttctttttctaattcatcaaacgctagatcataactatttgtttgttttactttgtcggcaatgtctttgaaaagctcgatatcttcttctttgaaatcagttgcttcacgaccacgatattcagtcttgcttagttggtaaccacgttcttctaaatgttgaacaattttacgtacttgcttctcacttagttctacgcgttgtgcaaattctttagttaacatactttaaagtcctttctgcatatactttatgtatactgacgtttgtctacgggcagtgaaacgtcagtcttgcttcatacatagtttaaacgttattgttagtgatttcaagtttgtttaaaatggtttacgtaaatccatttcttctaataaagcataaataatttcacgtgcgataccattggcaaatacatacttcaaaatataatttgatttaacacttgtaccgtagatatcctttgtcagtttaatatttttctttaaaaataagtccacttttttagtgtgaccatcattagttggatgaatgtaatcaatttcagtttgtctttcaaattgatgttcgtataaaaactgtctacggtgttcaataatgaggccgttatcttgtgttaaatctgcaggttctttagggacttccatcattaaaaagttaatacttctagaatgaacaaggtttgataataagtttagttcatgttcaatttgatgtaatgtttgcgtcattaactcatcatggttgggtaggtcttttgcgaataaataaattaaaaatgctgaattggttgtggcttcataatgtgcagttgctagactgacaacaacatcgttttctaagcctacgataaagacataatcgttttcggttttgttgttttctaatgagcgtttgatgatacgtttatcttcagttaaagataaatttaacttagtatcgtaaagtttaagtgcttcgttgtaatgtggatctttgacagattgaatggttttaaattccataagaacacctccccaatttaaataatattatagcataatcgcctgctgtaaaagactgttcataaacttttaaatggtataaaaaactgtactatcttaaattagacagtacagtaatctcattttgaattcagtgtgataactaagctttgggacctttagatgcttcagcaaaatgtgtaatatcaatctcttcataagctgaattattttcatgcacttcttgatgtgatgatttgtcacgaaccgctacaactaacattttatcgtctaaaataagttgtttatatttttctaattcatcaggcgctaagttgtagcgtgataaaactgcatgttcaccatcttctcctgttaacagtttagtcattctatcactaaatgttccacttgttgagataagggagatttcagagtcgtgtaagtcatttaggtgtaatttacttttactaataattgttagctctgattctaaataaccttcagatttcttttgattgattacgttgtataattcgccagtgtcatttactacagtaatatctgccatagttgtcgcccctttaaaaatttgtttatttaatcttttacccttcttattataaagtaaaacccttacattattaagttataagtcttcattcgcattaaacgtctctgtacatttataaaactattaaaagattacctaagcagttattgaaaaaatgccgaaaatttgctattatcgttaaataatttacataaactcatataatctaaagaatatggctttagaagtttctaccatgttgccttgaacgacatgactatgagtaacaacacaatactaggagtagcttcagccattaaattgtaaccatggtgggtgatttatatcattttatatgatggtcacagtttatttgatgaaacttcttttacattgattgcatgacaaattcgttatgcatgttcgttcactcataaaccctgaaactattatttagtttggggatttttttgtatctagcaccaatttaagagcaaaatgtttcacacaaatctgaggaggttttaagagtggagttactaggacaaaaagtaaaggaagacggcgttgtcattgatgagaagattttaaaagtcgatggatttttaaatcatcaaattgatgcaaagttaatgaatgaagttggtcgcactttttacgagcaatttaaagataaagggattactaaaatcttaaccattgaagcttccggtatcgcacctgcaatcatggctgcactgcattttgatgtgccatgtttatttgcgaaaaaagcaaaacctagcactttgacggatggttattatgaaacatctattcattcatttactaaaaataaaacaagtacggtcattgtttcaaaagagtttttatcagaagaagatactgtacttatcatcgatgactttttagcaaatggtgatgcttcattaggattatacgatatcgcacagcaagcgaatgctaagacagctggtattggtattgttgttgaaaagagtttccaaaatgggcatcaacgtttagaagaagcaggtttaacagtttcttctctctgcaaggttgcttcactagaaggaaacaaagtgacattggtgggagaagaataatgaaaaatttaatcctaagtgttcaacatcttttagctatgtacgcaggtgctatcttagttccaatcattgttggtacaagtttgaagtttacacctgaacaaatcgcttacttagttacagtagatatatttatgtgtggggttgccacatttttacaagccaataaagtaacaggaacaggattaccaatcgttcttggatgtacattcacggctgttgcgcccatgattttaattggtcaaacgaaaggaatagatgtactttatggttcgctatttttatcagggatattagttattatcatcgcgcctttcttttcacatcttgtaaaattcttcccaccagtagtaacgggtagtgttgttactatcattggtatcaatttaatgccagtagcaatgaattacttagctggaggtcaaggtgcaaaggactatggagatgttaagaacattttgttaggtttaatgacattaatcattattcttcttttacaaagattcacaactggatttattaagagtattgccatattaattggactcgttttaggaacgataggtgctggcttacttgggatggtcgatattaatcaagtcaatcatgccggttggttaggcatcccagtgccgtttagattctctggatttagctttgatgtgacatcgacgttagtgttctttattgtagctatcgttagtttaattgagtcgacaggtgtctatcatgcgttaagtgaaattaccggtaagaagttagaaagaaaagattttcgtaaaggttatactgcggaaggtctagcgatagtgttaggttctatattcaattcatttccgtatacagcctattcgcaaaatgtaggacttgtttctttatccggcgctaagaaaaacaatgttatatacggcatggtcgtgttattacttatatgtggttgtatacctaagcttggcgcattagcaaatatcataccgctacctgtgttaggcggtgcgatgatagctatgtttggcatggtaatggcatatggtgttagtatattaggacatatcgattttaaaaatcaaaacaatttattaattatcgctgtatcagtaggattaggtactggtataagcgctgtaccacaagcatttaaaggtttaggtgaacaatttgcatggttgactcaaaacggaattgttttaggcgcaatctctgcaattattcttaatttcttttttaatggaataaagtataaacaaacggaagaaaatgtgaaataatataactaattaatttgaaaaatggaggctgtttttaatgtgggaaagtaaatttgcaaaagaatcattaacgtttgatgatgtgttattaattccagcacaatctgatattttaccgaaagacgttgatttaagcgtacaattatcagacaaagttaaattaaatattccagttatttctgctggtatggatactgtaactgaatctaaaatggcgattgctatggctcgtcaaggtggtttaggtgttattcataaaaatatgggcgttgaagaacaagcggacgaagttcaaaaagtaaaacgctcagaaaatggtgtcatttcaaacccatttttcttaacgccagaagaaagcgtttatgaagcagaagcattaatgggtaaataccgtatttcaggtgtaccaattgttgataataaagaagatcgcaacttagtaggtattttaacaaaccgtgacttacgttttattgaagacttctcgattaaaattgtagatgtaatgacgcaagaaaatttaattacagctccagtgaatacaacacttgaagaagcagaaaaaattctccaaaaacataagattgaaaagttaccattagttaaagacggacgtctagaaggtcttattactattaaagatattgaaaaagttatcgaattccctaatgcagcaaaagatgaacatggtcgtctacttgtagccgcagcaattggtatttcaaaagatactgatattcgtgctcaaaaattagtcgaagcaggtgtggatgtcttagttatcgatacagcacatggtcactctaaaggtgttatcgatcaagtgaaacatattaagaagacttacccagaaatcacattagtagcaggtaacgtagcaactgcagaagcaacaaaagatttatttgaagcgggtgcagatattgttaaagttggtattggcccaggttcaatttgtacgacgcgtgttgtagcaggtgttggtgtaccacaaattacagcaatttatgattgtgcaactgaagcacgcaaacatggtaaagctatcattgctgatggtggtattaaattctcaggagatatcattaaagcattagctgctggtggacatgcggttatgttaggtagcttattagcaggtactgaagaaagcccaggcgcaacagaaattttccaaggtagacaatataaagtataccgtggtatgggctctttaggtgcgatggaaaaaggttcaaacgaccgttacttccaagaggacaaagcgcctaagaaatttgttcctgaaggtatcgaaggacgtacggcttataaaggtgcgttacaagatacaatttaccaattaatgggcggtgtgcgtgctggtatgggttatactggttcacacgatttaagagaattacgcgaagaagcacaatttacacgtatgggtcctgctggtttagcagaaagccatccacataatattcaaattacgaaagaatcaccgaactactcattctaattaagataaaggagaacgacaaatatggaaatggcaaaagaacaagagttaatccttgtcttagactttggtagccaatacaaccaattaattacacgccgaattcgtgaaatgggcgtttatagtgaattacacgatcatgaaatttcaattgaagaaattaagaaaatgaatccaaaaggtattatcttatcaggtggtccaaattcagtttatgaagaaggttcatttacaattgatccggaaatatataatttaggaattccagtacttggtatttgttacggcatgcaattaactactaaattattaggtggtaaagttgaacgtgccaatgaacgtgaatacggtaaagcaatcattaatgcgaagtcagatgagttattcgctggcttaccagcagaacaaactgtttggatgagtcattctgataaagttattgaaattccagaaggctttgaagttatcgctgatagcccaagcacagactatgcagcaatcgaagataagaaacgtcgcatttatggtgttcaattccatccagaagtacgtcatacagaatatggtaatgatttattaaataattttgtccgtcgtgtttgtgattgtagaggtcaatggacaatggaaaactttatcgaaatcgaaattgaaaagattcgtcaacgcgtaggagaccgtcgtgtattatgtgcgatgagtggcggcgtagattcatctgttgtagctgtactattgcataaagcaataggtgatcaactaacatgtatctttgtagaccatggcttacttcgtaaaggtgaaggcgacatggttatggagcaattcggtgaaggtttcaacatgaatattattcgtgttaatgcgaaagatcgctttatgaataaattaaaaggtgtttcagatcctgaacaaaaacgtaaaatcattggtaatgaatttgtatacgtatttgatgatgaagcatcaaaactgaaaggtgtagacttccttgcgcaaggaacactatatacagacgtcatcgaatcaggtactaaaacagcacaaacaatcaaatcacaccacaatgttggtggattaccagaagacatggaattcgaattaatcgaaccaatcaatacattgtttaaagatgaagtacgtaaattaggtattgagttaggtattccagaacatttagtatggagacaaccattcccaggacctggtcttggtattcgtgtacttggagaaattactgaagataaactagaaatcgttagagaatcagacgcgattttacgccaagtgattagagaagaaggtcttgaaagagaaatttggcaatacttcacagtgttaccaaacattcaatcagtaggtgttatgggagactaccgtacgtatgatcacacagtaggtattcgtgcagtaacatctatcgacggtatgacaagtgacttcgcacgcatcgattgggaagtcttacaaaagatttctagtcgtatcgtaaacgaagtagatcacgtcaaccgcgtagtctatgacattacatcaaaaccaccaagcacaattgagtgggaataattatatataataaaaccacctgtttgcacgggtggtttttaatttgagtagttggaaaattacaataaggacggaaaaggggtaaggtgttctaagtttgcgttttaattcatcaataaggcaattttccgtgtttatttttatataaaatttcatattgtttaggatcttcttgttttaaatcataaattatagtttcgtctactattttttctaattcaagtgtattaaagctccagtcatttgttgttattataaatattttttggactgggttgttatttatatgattaattagcctaggagtatctgtttctattattagagcagattctacaggatagtaaatagcaaagtctccgtgataaattgtgtttctttcatagaggttaacctctaaggttaaattactcaatttgaagattgtgttttgagttatatttttaggaataattcgattatctactatttgttttaggttgcctattgaacgagtgtgtatcgtcccttttgtgtaatcggaattatttaaagctcttaaaacagttgttaatttatactcgttaacataaccctttactaaagccatccgtttatcgctacctataaaatctttcagttttttgttgaattcattattgttgtgcataatattttatcctttccattagttgattgttttcatttgttcaaatctctatccatttactcggttacagggctgtgtatttgcagagtaatattatgattgaaataaccaacgcgttccgtattcgttttgagtgacgcagctagctgcgataatagtgacatgtggcttataacacattgtgtaatttattgtgtgttttgtgatgtctaatattgattgcagattgttgtatatttcacttaaagggcatttatataaaaaaagaggccagatgacgtatcatctgaccttcagctaaaacgctgagaatatgtcattcttcaagagaatgaagccggaatggttaccgggaatttgtaaatcaattatatcagatgtaatattacaattcaattagaaaagaactttatctttaattgcttttcgatttcattcatgtcatcttctgaaattattatcgttccagtaggatcagaatcatttattttgcttatacgtcttttgcttattgttgtaattgctgatatattaacgtatgtatctttccctttgtgcttggaataaacacctatcactctatacagttcattagctttttgatttaagttagacaaaagctttttatcttctgtgctaagtttaatgtcaatttctctatatttttgggctaatgcttgtactttactactgatatcgataatctgtttttttaaatctgttgctgttagatttagcaccgattcgtttaacttcaaataatttttattacctttggaagaaagtggaactattgtaactgtttcttttcctttattgtctttgttatctaatattacacaaaaatgattaccagaaaactcacttccaatattactccctagttttacatataccactgttcctctactatatgatttataatatctttttttattgcttgtaacatcgctatgtatagcaattgaataaaactctagccaatgaggcatgtatataactttcatgtttttactgtcggattttgaataagcttgttttagttttttgtttgacgtatttaatttactatttgcttgattgatatttttagacattaaatagtgttctcctaatcaatttattcttctttatatcagcattattagcactgaaattaacatgaatggtacgaaaatagatgttactataaaaccaacaatttttattaggtggaactcatcaattttgtatttagcaaatttcgcaatgacctgctatttattcgctttttatagttcatgtatgtgtaaaaaagtctatattgaacatctaattataagcgaattcctaatgctaaaagcaatctaacttacttaaatattattatgagtttttattgaaattaaataaatttaaactatttcttagtctctccatatcgttggaagttggttctttatataatcagataaattagaatcttcaagtaatgtatctttaaaaagttcagtttctaaatcaactttaaaatttgctttaaaacatcatgttccatttttaaatgttgaacttctttgcgtaattttattaactctttttcatcactttttaaattatcttgatgattgaagggtccagtattttggtgttgttttatcgaatttgagataattgagggttttaaatcatactttcgtataatttcattcttaagcttaccatttttatataatctaaccatttgtaacttaaactctgaactaaatgttcttctttcttttgtcataataaaattgactactttcttaatttaacaatatctattctcatagaatttgttcaattaagtgtagacgattcactgacacatcataagtacgtaaggaattttgatcgttcattgttattgctttatgttttagggaatgtgctattgaaggggttaaagatgtttgaaatgtcttggtttcttgacttatatagttatgaaagagggcgttgtcctttatagcatttctgagattagaaatgctataaataaagtgattaagattttttgttttcatgtaatttaagaaatggatttgttttttgtgggttatttttaattctgttcttaaatggtttgaattttgcgattgcaaatatgatagctgcttcttttgacaaagtaatagaacctttttcttctggtaccatgataatcactccttgtgcaattggatttaaatattataaaataattttactatacaaaatatattgtgtaaatagtttcttattgttaccaaataatatgtttggaagcgttatgtaatgccaatcaacaccgaagttctcatgtcctctttccttttacgactacatatattgttaataatattgaaataataaactgatagtgataatatttatttaactgatccatgagagtaggaaccccatcatacgggaatttcgaaatcatgggttttttgttttaaaggattgatgcaatagataaagtagccattctaatatatggagtatttatcagctgaaaattaaatcagatatgggttttcttcattaaataatttttctataaggaaacagaggcaacgctactgtcacctctgcttgaaataattaggatgaaatactctgagtctaaagtccacacacaattcgctcaaatcctccaaacctccgactacatctccaaccccccaaacaccaatacttaccaaagcattgatatgagtgccaatactggcaatgtgccttgtttgaaaaagatactaatattgcttgaaaggccaccataaatagcaacgccaatgatatacactaaaatagctgcgcatatttcttttggattactgctgataaacaaaccgtatattagcaaaactctgattaaaccgttatatacgccttggttcttcaaaagtaggttaatatttttgtctttcaatttatcgacgcttatattaaatgtctcgctagtctttttggaagttgtagcaatcgtttcaaggtacataatatagaaaaactctaatgccacaaatatgattaaaattgttgagatgatattcactttaacgctcctttattattaaatattttcttgtaaaaatgattgcagtgtctgtggttgatcattgactaattgttggaaatcattggattcttggtctaatagtcctcttgctcctgcgtcgtacattgatgccaataatgcaccaaagcctttaggttcatcatacatttctgcaaatgtctctaatgaaacgggctcatatttaatttctgtgcctgatgcctcagataaaattgcagcaagttctttcatatcataactgtagcctgataataagtagcgtttgccccaagtatctggatttttaataatagcaatgacacctctagcaatatcatttctagtaatataattaatacgaccatcgccagctggataaatcagtttatgcatattcatcaattctggtaaatatggtttaagtggatccatgtacattgccattcttacatacgtatagtcaatgccacttgttgccaatagacgtgctgcataaccaaaataaggactcatatggaatggattattatgctgatctgcgtaataacctatgaaaatgatatgagcaacgccgctctgctttgccgcatatactaaattttccacttcaggaatacgtttgaatgatggatggataatacttggaataaacacaacggtatccattcctttaaatgcttctaccatgctttcttgattaaaataatctaattgtcgaacaggaacttttccgcgccaatcttctggaactttctcaacatttctaacaccaatgtgaaaatgatctatgtgatttgcaatggcttgatttgtaatatgtgtgcctaaatgacctgtagcacctgttaacataatattcattcacttcatctcctaatctttatatacataacataatacttatttgatggttttcaaaacatttgattttataaaaaattctaatctgtatttattgtcgacgtgtatagtaaatacgtaaatattattaatgttgaaaatgccgtaatgacgcgttttagttgatgtgtatcactaatatcattgaaaattttaatcaggtactacgacaatatgatgtctgttttgtgtctgaaagttttacagtttttaaaataaaaatggtataaagtgtgatttgtataaaaaagagtctcgacggataagaattgattaataacagttagcattttattaattaccttaacaatgattcaagtttagttaaatgaggtttaatttgaaaggggatagcgcctcaatataatgtaggtagattgttcatattacgtaattgaaaaatcaaatttaaatagattggggctaaaaattatgaaatttaaagcgatagcaaaagcaagtttagcattgggaatgttagcaacaggtgtaattacatcgaatgtacaatcagtacaagcgaaagcagaagttaaacaacaaagtgaatcagagttaaaacactattataataaaccaattttagagcgtaaaaatgtgactggatttaaatatactgatgagggtaaacactatttagaagtcacagtagggcaacagcattctcgaatcactttacttggatctgataaagataaatttaaagacggagaaaactcaaatatagatgtgtttatccttagagaaggtgacagtagacaagcaacaaattactcaattggtggcgttacaaaatcaaatagtgtgcagtatattgattatatcaatacgccaattttagaaatcaagaaagataatgaagatgtacttaaagatttttactacatttcaaaagaagacatctcattaaaagaacttgattatagattaagagaacgtgcgattaaacaacacggcttgtattcaaatggtcttaaacaaggtcaaattacaattacaatgaatgatggcacaacacatacaatcgatttaagtcaaaaacttgaaaaagaacgtatgggtgagtcaatcgacggcactaagattaataaaattctagtagaaatgaaataatactttctaacaacaaagcgctatgttgaatagtgcttgttatggaaatatatggaagttaagcgacgtactgttgcttagcttctttttttgaggggaaaagttacaaaactcacacaaacagtcgcaccacgcattatcttttgcttaaatagcttaatcatattttatgaatagttaaaaacaggttaatgtgaatatccgaatacagctcctataatatgggtgtatgattcaaattacgtaataaaacaatctaattataatagattggagcatacaactatgaaaatgaaaaatattgcaaaaataagtttgttattaggaatattagcaacaggtgtaaacactacaacggaaaaaccagttcatgccgaaaagaaacctattgtaataagtgaaaatagcaaaaaattaaaagcttattataatcaacctagtattgaatataaaaatgtgacaggttatatcagtttcattcaaccaagtattaaatttatgaatatcatagatggtaattctgttaataatattgctttaattggcaaagataagcaacattatcatacgggtgtacatcgtaatcttaatatattttacgttaatgaggataagagatttgaaggtgcaaagtactctattgggggtatcacgagtgcaaacgataaagctgtcgacctaatagcagaagcaagagttattaaagaagatcatactggtgaatatgattatgactttttcccatttaaaatagataaagaagcgatgtcattgaaagagattgattttaaattaagaaaataccttattgataattatggtctttacggtgaaatgagtacaggaaaaattacagtcaaaaagaaatactatggaaagtatacatttgaattggataaaaagttacaagaagaccgtatgtccgatgttatcaatgtcacagatattgatagaattgaaatcaaagttataaaagcataacacatatacttgatgacgaaataagttgaaattgaaatagagaggttaagtgacgatcaaacgttgcttaacttctttttaatgcttaaaaattatttcaaaggcacatagaaacgctatattaatctcatactcactcattattttttgcttaaattacttaataatacttcaataattgttaaaaggggtttaatgtgattatcttagaacgccatctataatgatgttgtatgattcaaattacgtaaaaagacaatcgaatataatatagattggagcatacaattatgaaaatgagaacaattgctaaaaccagtttagcactagggcttttaacaacaggcgcaattacagtaacgacgcaatcggtcaaagcagaaaaaatacaatcaactaaagttgacaaagtaccaacgcttaaagcagagcgattagcaatgataaacataacagcaggtgcaaattcagcgacaacacaagcagctaacacaagacaagaacgcacgcctaaactcgaaaaggcaccaaatactaatgaggaaaaaacctcagcttccaaaatagaaaaaatatcacaacctaaacaagaagagcagaaaacgcttaatatatcagcaacgccagcgcctaaacaagaacaatcacaaacgacaaccgaatccacaacgccgaaaactaaagtgacaacacctccatcaacaaacacgccacaaccaatgcaatctactaaatcagacacaccacaatctccaaccataaaacaagcacaaacagatatgactcctaaatatgaagatttaagagcgtattatacaaaaccgagttttgaatttgaaaagcagtttggatttatgctcaaaccatggacgacggttaggtttatgaatgttattccaaataggttcatctataaaatagctttagttggaaaagatgagaaaaaatataaagatggaccttacgataatatcgatgtatttatcgttttagaagacaataaatatcaattgaaaaaatattctgtcggtggcatcacgaagactaatagtaaaaaagttaatcacaaagtagaattaagcattactaaaaaagataatcaaggtatgatttcacgcgatgtttcagaatacatgattactaaggaagagatttccttgaaagagcttgattttaaattgagaaaacaacttattgaaaaacataatctttacggtaacatgggttcaggaacaatcgttattaaaatgaaaaacggtgggaaatatacgtttgaattacacaaaaaactgcaagagcatcgtatggcaggcactaatattgataacattgaagtgaatataaaataatcatgacattctctaaatagaagctgtcatcggaaaaacaagaagttaagtgacaacggtttacatgttgcttagcttcttttattatgcgtaatgatgtaaaaagacgaatattcatttgtttgtaaaagtggcatttctatgtcttaaaagtgacgaaacttcaaatgtgccaagtgttgaatcacatcaaaatcatttttatttaacgaacattatggatttcttaatttacttaacgatgattcaaatatagttaaacaaggtttaatgtgaatggagcaatacgccatctataataaagctgtatgattcaatgaatgtaatcgaacaaatctaataattacgaatggagcatacaactatgaaaataacaacgattgctaaaacaagtttagcactaggccttttaacaacaggtgtaatcacaacgacaacgcaagcagcaaacgcgacaacaccatcttccactaaagtggaagcaccacaatcaacaccgccctcaactaaaatagaagcaccgcaatcaaaaccaaacgcgacaacaccgccctcaactaaagtagaagcaccgcaacaaacagcaaatgcgacaacaccgccttcaactaaagtgacaacacctccatcaacaaacacgccacaaccaatgcaatctactaaatcagacacaccacaatcgccaaccacaaaacaagtaccaacagaaataaatcctaaatttaaagatttaagagcgtattatacgaaaccaagtttagaatttaaaaatgagattggtattattttaaaaaaatggacgacaataagatttatgaatgttgtcccagattatttcatatataaaattgctttagttggtaaagatgataaaaaatatggtgaaggagtacataggaatgtcgatgtatttgtcgttttagaagaaaataattacaatctggaaaaatattctgtcggtggtatcacaaagagtaatagtaaaaaagttgatcacaaagcaggagtaagaattactaaggaagataataaaggtacaatctctcatgatgtttcagaattcaagattactaaagaacagatttccttgaaagaacttgattttaaattgagaaaacaacttattgaaaaaaataatctgtacggtaacgttggttcaggtaaaattgttattaaaatgaaaaacggtggaaagtacacgtttgaattgcacaaaaaattacaagaaaatcgcatggcagatgtcatagatggcactaatattgataacattgaagtgaatataaaataatcatgacattctctaaatagaagctgtcatcggaaaaacaagaagttaagtgacaacggcctacatgttgcttagcttcttttgttatgttcgatgatttgagaacccgaattttcgatgggtccaaatatgacgtggaagagacctgaatttatctgtaaatccctatctatcgggtgtgaagcacaacgggatcagttttatttaacgaacattatagattccttaatttacttaataatgattcaatgattattaaacatggtttaatgtgaaaggtcaaatacgctaactataataaagctgtatgattcaatagacgtaagcgaacaaatctaataattacgaatggagcatacaactatgaaaatgacagcaattgcgaaagcaagtttagcattaggtattttagcaacaggaacaataacgtcattgcatcaaactgtaaatgcgagtgaacataaagcaaaatatgaaaatgtgacaaaagatatctttgacttaagagattactatagtggcgcaagtaaggaacttaaaaatgttactggttatcgttatagcaaaggtggcaagcattaccttatctttgataaaaatagaaaattcacaagagtacagatatttggtaaagatattgaaagatttaaagcacgtaaaaatccgggattagacatatttgttgttaaagaagcggaaaaccgtaatggcacagtgttttcatatggtggtgtcactaagaaaaatcaagacgcttattatgattatataaacgcaccaagatttcaaatcaagagagatgaaggtgacggtattgctacgtacggtagagtacactacatttataaagaagagatttcacttaaagaactcgactttaaattgagacagtatttaattcaaaattttgatctgtataaaaagtttcctaaagatagtaagataaaagtgataatgaaagatggcggctattatacgtttgaacttaataaaaaattacaaacaaatcgcatgagtgacgtcattgacggtagaaatattgaaaaaatagaagccaacattagataattcaatgaaatatggataatagtaaaatatggatagtatagaggagttaggcaacataagttgcttagcttcttttttgtgttggagagatgaaaatgaagcgtatcgatgaataataaaaacaccaataaaacttgtggaaatagttgatacttatagtcgcgcgttgtccttttcgtgacatgaaacaatgtggaaaacatagttaaattgagggaaagtgtgaatagttaaaaaagctgcgttaagtttaaaaaatagattaacgctgttaggattccattaattagcttaacattggttcaaaaatagttaaaaagaggttaattcatagcttagtattacgcttatataatgatagtagattgttcgtattacgtaattgaaataatcatataaaaatatattaagacaaaatttataaatagattgggagaatagtactatgaaattaaaaacgttagctaaagcaacattagtattgggattgttagctactggtgtaataacaacagaaagtcaaacagtaaaagcggcagaatcaactcaaggtcaacacaattataaatcgttaaaatactactatagcaagccaagtatagagttaaaaaatcttgatggtttgtatagacagaaagtgacagataaaggagtatatgtttggaaggatcgaaaagattattttgttggcttgcttggtaaagatattgaaaaataccctcaaggtgagcatgataagcaagatgcatttttagtcatcgaggaggaaactgttaatggaagacaatattcaattggtggtttaagtaagacaaatagtaaagaatttagtaaagaagtcgatgttaaagtaacaagaaaaattgatgaatcatcggaaaagtctaaagatagtaaatttaaaattactaaagaagaaatctcgttaaaagagttggactttaaattaagaaaaaaattgatggaagaagaaaaattatatggtgctgttaataatagaaaaggtaaaattgtagttaaaatggaagatgataagttttatactttcgaacttacaaaaaaactacaaccgcatcgcatgggtgacacgatagatggtaccaaaatcaaagaaattaatgttgagctagaatataaataatctttggacaagcagactagtaattgtagggaagttaagcgataacatattgcttagcttcttttttattttgttatgatgaaaaaaggagcgggtttatgatcaagtttttggaaaaacggttgatacttatagtcgcgcgttgtccttttcgtgacatgaaacaatgtggaaaacataattaaattgagggaaagtgtgaatagttaaaaaattagtattgtgttataaaaaataattaatactgttaggatttcattaactaacttaacgttggttcaaaaatagttaaaaagaggttaattcatagcgcagtatctcacttatataatgatagtagattgttcgtattacgtaattgaattaatcatataaaaatatattaagacaaatttataaatagattgggagaatagtactgtgaaattaaaaacgttagctaaagcaacattggcattaggcttattaactactggtgtgattacatcagaaggccaagcagttcaagcaaaagaaaagcaagagagagtacaacatttatatgatattaaagacttacatcgatactactcatcagaaagttttgaattcagtaatattagtggtaaggttgaaaattataacggttctaacgttgtacgctttaaccaagaaaatcaaaagcaccaattattcttattaggtaaagataaagagaaatataaagaaggcattgaaggcaaagatgtctttgtggtaaaagaattaattgatccaaacggtagattatctactgttggtggtgtgactaagaaaaataacaaatcttctgaaactaatacacatttatttgttaataaagtgtatggcggaaatttagatgcatcaattgactcattttcaattaataaagaagaagtttcactgaaagaacttgatttcaaaattagacaacatttagttaaaaattatggtttatataaaggtacgactaaatacggtaagatcactatcaatttgaaagatggagaaaagcaagaaattgatttaggtgataaattgcaattcgagcgcatgggtgatgtgttgaatagtaaggatattaataagattgaagtgactttgaaacaaatttaaagtaagtaatcaatgactctaaagtaataaatttgaagcagcttaacgatgaaatgttgaatagatacgtacaccttacattaaggagcgtatttaaaacaaccttgtcgttaggcttttttttacgttttataacgcaggttatgagtgagcatactaaaaatttacattgctcttgaaagtgatgcccattgaatattaattagctcttcattaacaatgatttaagtttaattaaacgagtgttaatgtcagtctgtctcaatgccctttataataaaggtgtattattcaaattacgtaataaaagcaatccaatatattaagattggagcacatgaatatgaaatttacagtgatagctaaagcgatatttatattaggaatattaacaacaagtgtaatgataacagaaaatcaatcggttaatgcaaaaggaaagtatgaaaaaatgaaccgtttatatgatacaaacaagttacatcaatactattcaggacctagttatgagttaacaaatgttagtggccaaagtcaaggttattatgactctaacgttttgctttttaaccaacaaaatcaaaagttccaagtgtttttattgggaaaagatgaaaataaatacaaagaaaaaacacatggtttagatgtctttgcggtaccagaattagtagatttagatggaagaatatttagtgttagtggtgtaacaaagaaaaacgtaaaatcaatatttgagtctctaagaacgccgaacttactagttaaaaaaatagacgataaagacggtttttctattgatgaatttttctttattcaaaaggaagaagtgtcattgaaggaacttgattttaaaataagaaaactgttgattaaaaaatacaaactgtatgaagggtcagctgataaaggtagaattgttattaatatgaaagatgaaaataagtatgaaattgatttaagtgataaattagatttcgagcgtatggcaaatgtcattaatagtgaacaaattaaaaacatcgaagtgaatttgaaataatcaatgatatatatagaatgaaagcttaagaagcggtttaataatcccatgtttaatgattttgatacgtgtttttataataaaaacatatcgaacattgactacgttattaagctgcttttttgtacactttataaccaatagcttaagatttaaaactaatcggaaagaacaatgattcaccaaaaaaatatttatgttgctattaaaaatcagttaatacgaatgttaaaatacgtttgattttcattaataatgattcaagtttatttaaatgagcgttaatgtcagtctgttttgatgcaccttataataaagacagatagttcaaattacgtaataataacaatccaatacattaagattggagcaaaaaaatatgaaattaacaacgatagctaaagcaacattagcattaggaatattaactacaggtgtgtttacagcagaaagtcaaactggtcacgcgaaagtagaacttgatgagacacaacgcaaatattatatcaatatgctacatcaatactattctgaagaaagttttgaaccaacaaacattagtgttaaaagcgaagattactatggctctaacgttttaaactttaaacaacgaaataaagcttttaaagtatttttacttggtgacgataaaaataaatataaagaaaaaacacatggccttgatgtctttgcagtacctgaattaatagatataaaaggtggcatatatagcgttggcggtataacaaagaaaaatgtgagatcagtgtttggatttgtaagtaatccaagtctacaagttaaaaaagttgatgctaaaaatggcttttcgataaacgagttgttttttattcaaaaggaagaagtatcattgaaggaactggactttaaaataagaaaactcttaatcgaaaaatatagattgtataaaggaacgtctgataaaggtagaattgttatcaatatgaaagacgaaaagaagcatgaaattgatttaagtgaaaaattaagttttgaacgtatgtttgatgtaatggatagtaagcaaattaaaaatattgaagtgaatttgaattagttcgagttaatagcataatagcttaagaagcggcttaacgacaaaatgtgaattggcatttgtgtccttatataaggaactgtgttaaatacattactgttgttaagttgtttttgtaattcaaagagcagaacagagtaacatcatcagttgtagtaaacgataatccggtaaaacaactaaatgaaataatgaaagtcatttaacctgaacattaaaatatatttgtttttcattaagaataattcaagtatatttaaatcgaggttaattatcgtatgaaacgatgcacgttataataaaaatgtatgattcaaattacgtaatgaaaacaatccaatatattaagattggagcaaataaatatgaaatttacagcattagcaaaagcgacattagctttaggaattttaacaacaggaactttaacaacagaagttcattcaggtcatgcaaaacaaaatcaaaagtcagtaaataaacatgacaaggaagcattataccgatactacactggaaagactatggaaatgaaaaatattagtgctttgaaacatggtaaaaacaacttacgttttaagtttagaggtattaagattcaagttttactgcctggaaatgataaaagtaaatttcaacagcgtagttatgaggggttagatgttttctttgttcaagaaaaaagagataagcacgatatattttatactgttggtggtgtaatacagaataataaaacatctggagttgtcagtgcaccaatattaaatatttcaaaagaaaagggtgaagatgcttttgtgaaaggttacccttattacattaaaaaagaaaaaataacactaaaagaactggattataagttgagaaagcatctaattgaaaaatacggactttataaaacaatctcaaaagatggtagggtcaaaattagcttgaaagatggcagtttttataaccttgatttaagatctaaattaaaatttaaatatatgggggaagtcatagaaagcaaacaaattaaagatattgaagttaacttaaagtaaatcattacgaataattaaaagtaattgaagcggcttaacggtgaaatgtaaattggtgcgcatagcttatacaaaaaggatgcatcaatcgatatcgtcgttaagccgttttggtttgtgtgtcatgaatcctatcccaatctccataaaggtaaaatttccaccaccaacatcaaaattctccacatcgcaacataaccaaatgttataataaatctattacacaaagagataaattacttattcaaaggcggaggaatcacatgtctattactgaaaaacaacgtcagcaacaagctgaattacataaaaaattatggtcgattgcgaatgatttaagagggaatatggatgcgagtgaattccgtaattacattttaggcttgattttctatcgcttcttatctgaaaaagcggaacaagaatatgcagatgccttgtcaggtgaagacatcacgtatcaagaagcatgggcagacgaagaataccgtgaagacttaaaagcagaattaattgaccaagtcggttacttcattgagccagaagatttattcagtgcgatgattcgtgaaattgaaacgcaagatttcgatatcgaacacctggcgacggcaattcgtaaagttgaaacatcaacattaggtgaagaaagtgaaaatgactttatcggtctgttcagcgatatggatttgagttcaacgcgactaggtaacaatgtcaaagaacgtactgctttaatctctaaagtcatggttaatcttgacgacttaccattcgttcacagtgacatggaaattgatatgttaggtgatgcatatgaattcctaattgggcgctttgcggcgacagcgggtaaaaaagcaggcgagttctatacaccacaacaagtatctaagatactggcgaagattgtcacagacggtaaagataaattacgtcacgtgtatgacccaacatgtggttcaggttcactgttgttacgtgttggtaaagaaacacaagtgtatcgttatttcggtcaagaacgtaacaatactacatacaacttagcacgcatgaatatgttattacatgatgtgcgttatgagaacttcgatatccgtaatgatgacacattggaaaacccagcctttttaggcaatacatttgatgcggttattgcgaacccaccgtatagtgcgaaatggactgcagattcaaagtttgaaaatgacgaacgattcagtggttacggcaaacttgcgcctaagtctaaagcagactttgcctttattcaacacatggtacattacctagacgatgaaaggtaccatggccgttgtactcccacatggtgtattattccgaggtgctgcagaaggtgtcattcgtcgttatttaattgaagaaaagaactacttagaagctgtgattggtttgccagcgaatattttctatgggacaagtattccaacatgtattttagtatttaaaaaatgtcgccaacaagacgacaacgtactatttatcgatgcattcaatgattttgaaaaaggaaaaaatcaaaatcatttaagcgatgcccaagtcgaacgtattatagacacatataagcgtaaggaaacaattgataaatatagctacagcgcgacactacaagagattgccgataacgattacaacctaaatataccgagatatgtcgatacattcgaagaagaagcaccgattgatttagatcaagtccaacaagatttgaaaaatatcgataaagaaatcgcagaaattgagcaagaaatcaatgcatacctgaaagaacttggggtgttgaaagatgagtaatacacaaaagaaaaatgtgccagaattgaggttcccagggtttgaaggcgaatgggaagagaagcagttaggggatcttacagatagagtaattaggaaaaataaaaacttagaatcgaaaaagcctttaacaatatccggacagttaggtttaatgatcaaacagaatattttagtaaatcagtttcgtcgaaaaatctagaaaattatacactaataaagaatggagaattcgcgtataacaaaagttattctaatggatacccattaggggctattaaaagattaactagatatgatagtggtgtattgtcctctttgtatatttgtttttctattaaaagtgaaatgtctaaagacttcatggaagcatattttgattcgacacactggtatagagaagtttctggaattgcagttgagggtgcaagaaatcacggattattaaatgtttctgtgaatgatttttttactattctaattaaatatccaagtttagaagaacagcaaaaaataggcaagttcttcagcaaactcgaccgacaaattgaattagaagaacaaaagcttgaattacttcaacaacagaaaaaaggctatatgcagaaaattttctcacaggaactgcgattcaaagatgagaatggtgaagattatccagattgggaaaatagcaaaatagaaaaatatttaaaagagagaaacgaacgttctgacaaagggcaaatgctttcagtaactataaatagtggcattataaaatttagtgaattggatagaaaagataattcaagtaaagataaaagtaattataaagtagttaggaaaaatgatattgcatataattctatgagaatgtggcaaggggctagtggtaaatcaaattataatgggattgttagccctgcatatactgtgctttatccaacacaaaatactagctcattatttattggatataagtttaaaacacatagaatgattcataaatttaaaattaattcacaaggattaacatcagatacatggaacttaaaatataaacaattaaaaaatataaatatagatatacctgtattggaggaacaagaaaagataggtgatttctttaaaaaaatggatatattgataagtaaacagaaaatgaaaattgaaatattagaaaaagagaaacaatcctttttacaaaaaatgttcttataactttgataaatacatagattgcataagaataaaatttgtataatttaacataaaagttgtaaaagtaaagtgaattaaaaacgaacattaaatttaggcactgtgaaagcgcagtgtcttttttgtgtcgaaattgtgtacagaataagtagttaaataaagattaagttgagataaagtgttattcgtaaataaaagagagtagatcgataggaattgaatgatattagttaactatttattaaattacttaataatgattaatttttagttaaagtaagtttaatgtgaagcacgaccattgctcattataatgaatgaggattgttcgtattgcgtaatagaataaatcaaatagactaaaaattgggagcatagaattatgaaattaaaaaatattgctaaagcaagtttagcactagggattttaacaacagggatgattacaactactgctcagccagtaaaagcaagtacattagaggttagatcacaagctactcaagacttgagtgaatattataatagaccgttctttgagtatacaaatcagtcaggatataaagaggaaggaaaagtgacgtttactcctaattatcaacttatagatgtaactttaactgggaatgaaaagcaaaattttggtgaagatatttctaatgtagatatatttgttgtaagagaaaattctgatagatctggtaatacagcttcaattggtggtattactaaaacaaacggttcaaattatattgataaagtaaaagatgtaaatttaataattactaaaaacatcgatagtgttacatcaacgtcaacatcatctacatatacaattaataaagaagaaatttcattaaaagaacttgattttaaattaagaaagcatttaattgataaacataacctttataagacagaacctaaagacagtaaaattcgaattactatgaaagatggtgggttctacacatttgaattgaataaaaagttacaaacacaccgtatgggtgatgttattgatggcagaaatatagaaaaaattgaagtgaatttataaaattattcgagggagcatatcatgagggaaaattttaagttacgtaaaatgaaagtcggtttagtatctgttgcaattacaatgttatatattatgacaaacggacaagcagaagcatctgaaaatcaaaacgctttaatctctaatataaatgtagacaatcaggaaaaacagaataatgtaaatcaagctgttcagcctcaaaataatactaatgaaacatcaaaagtaccggctaattttgtcaaattgaatgatattaaaccaggtgatacttctatacaaggaacaactttaccaaatcaatttatactattaactattgataaaaaagatgtgagctcagttgaagattctgacagcagctttgttatgtctgataaagatgggaattttaagtatgacttaaatggtcgcaaaattgttcataatcaagaaattgaagtgtcttcatcagatccctatttaggtgacgatgaagaagatgaagaagtagaagaaacttcaactgaagaagttggtgctgaggaagaaagtacagaagctaaagctacatatacaacaccgcgatatgaaaaagcgtatgaaataccgaaagaacagctaaaagaaaaagatggacatcaccaagtttttatcgaacctattactgaaggttcaggtattattaaaggccatacctctgtaaaaggtaaagttgctctatctattaataataaatttattaactttgagacaaatgctaatggtggtccaaataaagaagaagcgaaatctggatcagaaggaatctggatgcctattgatgacaaaggatactttaattttgacttcaaaacgaaacgtttcgatgatttagagttaaagaaaaatgatgagatctcattaacatttgcacctgatgacgaagatgaggcattgaagtcattaattttcaaaactaaggtaacgagtttagaagatattgataaagcagaaactaaatatgaccatactaaagtggaaaaagtaaaagtattgaaagatgttaaagaagatttacatgtagatgaaatttacggaagcttatatcatacagaaaaaggtaaaggtattcttgataaagaaggtactaaagtaattaaaggtaagactaaattcgcaaatgcagttgtgaaggtagactctgaactaggtgaaggtcaagaattccctgatttgcaagtcgatgaaaaaggtgaattcagctttgatgtagatcatgctggatttagattacaaaatggagaaacactaaacttcacagtagttgatcctattacaggtgaattattaagtggaaattttgtttctaaaaacatagatatttatgaatctcctgaagaaaaagcagatcgtgagtttgatgaaagaatggaaaacacacctgcatatcataaattacatggtgataaaattgtcggctacgatactaacggattcccgattacctggttttatccattaggtgaaaagaaagttgaacgtaaggcaccaaaattagaaaaataattaaataaaacagcttaatgatgtaatgaaattagtgagttaatcactgacttctacgtcattgagctgttttttgtgctttgttacaaagcattattgaatttattttacgtgttcatattttgaaacatcaaagccgtcttgtttagctttgttgataatgtctttgattgaatgtagtcctttatcggcgaagtatgatcttaagttgtcttttgtagcttggtcagcattcttatctaataacacatcaatataacttaattcatgttctaagaagtttgcatcatcatgtagtacgagtccattttgagaataaactttcgcatctgcttgattaccatatccaacaacgccagttgctaaaacacctaccattgccgtagctactaaaacctttttaaatttcatatctatcactcctctaaaaattgtaactccatcataacactgaatattaagaaaattacgtttattaagtcgatttaataatttttaataaatagttaaagtgacaaatattgtttaaatgcaattaatctttaatacgatgcttgaggatttttcctaataaaaccttgatttcaaaaagggtttaaatcaaatgaaacaataataaaaaaatgacgcaatataataataagtacaaatttaattaagaaattaaattgattgtatatgtatattttggtaacgtaaaagagaaatatacaaaataattaattatttatatgaaaagagaatataaatgaagtataaaacagagagacgtgaagcgatgggatatttaaaaaggtttgcattgtacataagcgttatgattttaatatttgcgatagcaggttgtggcaaaggtaatgaaacaaaagaagattcaaaggaagaacaaatcaaaaagagctttgcgaaaacattagatatgtatccaattaagaatctcgaggacttatatgacaaagaaggatatcgagatagcgaatttaaaaaaggtgacaaagggatgtggacgatatatacagatttcgccaaaagtaataaaccgggtgtattagataatgaaggtatgattttaaatttggatagaaatacacgtacggccaagggatattattttgtagatactatatatgacaatcatgaaaactcttatagtaaaaattatagagttgagatgaaaaacaataaaattattttattagacaaggtggaagatcaaaaacttaaagaaagaatagaaaactttaaatttttcggacaatatgccgatttcaagagtttgaaaagttacaacaatggcgacgtttcaattaatagtaatgttccaagttatgacgcgaaatttaaaatgagtaataaagatgaaaatgttaagcaattaagaagtcgttataacattcctactgaaaaagctccaatattaaaaatgcatattgatggggacttaaaaggcagttccgttggatataaaaagttagaaatagacttttcaaaagaagaaaatagcgaattatcagtagtcgattcattaaattttcagcctgccaaaaaaaataaagatgatgaatgatagggaggatgtgaaacaatgtggtcaataaaaagaattggaatgtacacaaatgttataattttgagcgtttttataataggttgtgatagttcaagcaataatgcagaaaatcaaagagaagactcaaaagaagaacaaatcaaaaagagctttgcgaaaacgttagatatgtaccctattaagaatctcgaggatttatatgacaaagaaggatatcgtgatggtgagtttgaaaaaggcgataaggggacgtgggtattgtattcagctatggtatcacaaccaaaaggcgagagtttaaaatcacgaggaatgatattaaagttagatagaaataagagaactgctaaaggaagttatattattagagaattgaaagaagataaaaatcatgatgttcaaaaaaatgaaaagaaatatccagtgaaattggtgaataataggatagttttgataaaagatgttaaagacaaaaagttaaaaaaatgaaatagagtcgtttgaattattttcacaatatggaaactttaatcattttgatcggaatgagattactaatatttcatataatcctaatgctcccaattactctgcagaatataaaatgaagaaaaatgacagaaacattcaacagttgaaaaagagatttaatctaaaaactagcaagacaccaaaattattgtttaagggatctggagatataaaggggtcttctgtaggatataaggaaatagaaatcatatttagtagaagtaaagaagaaagcatttattatgttgacagcgttgagttcgttccaagtaacaaaataacaaaaagttgatattagtcaacaaaagcaaatattgagaataaagagagttgtgaaatgatgggttatttaaaaagacttgtattgtatatagttattatggttatgagtgtttttataataggttgtgataaatcaagcgatactgcagaaaaatcaaaagaagactcgaaagaaacacaaatcaaaaagagttttgcgaaaacgttagatatgtattcaattaagaatctcgaggaactatatgacaaagaaggctatcgagatggcgaatttgaaaaaggtgacaaagggatgtggacgatatatacagatttcgccaaaagtaataaaccgggtgaactaagtaatgaaggcatggtcttgtacttagatagaaacacacgcacagctaaggggtactactttgtcaggacgttttatcgcaaggataaattacctgatagaaaaaattataaagttgaaatgaaaaataataaaatcattttattagataaagtagaagataaaaagcttaaacaaaaaatagaaaattttaaatttttcagtcaatatgcaaatcttaaagaattgaaaaactacagcaatggtgatgtctcaattaatgagaatgttccaagttatgacgtgaaatataaaatgagtaataaagatgaaaatgttaagcaattaagaagtcgttataatattcctactgataaatcaccggtattaaaaatgcatattgatggtaatttgaaaggaagttccgttggagataggaagttagaaattgatttttcgaaacgtgaaaatagccatttatcagtaatagattctttggattaccagccagcgaaaactaataaagatgatgaataatgaggatggtgtgtaacaatgaagtctataaaaaggattggattgtgcataagtctgttgattttaagcatttttgtaacatcttgcgatggtgataataagatcactggagattcaaaagaaacacaaatcaaaaagagcttttcgaaaacgttagatatgtatccaattaagaatctcgaggacttatatgataaagaaggataccgtgatggcgaatttaaaaagggcgacaaaggaatgtggactatatatacagattttgctaaaggcaataaatcagacgaattggatgatgaaggtatggttttaaatctggatagaaatactcgaacggctaagggatattattttgttaagaaattttatgaaaaggataaattacctgatagaaaaaattataaagttgaaatgaaaaataataaaattatcttattagacaaggtagaagatccaaatctaaaaaagagaatagaaaactttaaatttttcggacaatatgcaaattttaaggatttggaaaattacaacaatggcgacgtgtcaataaattggaatgttccaagttatgacgtggaatataaaatgagcaataaagatgaaaatgttaaacaattaagaagtcgttataacattcctactgataaagctccaatgttaaaaatgcatattgacggggacttaaaaggtagttctgttggatataaaaggttagaaatagatttttcaaaagaaggtagggatatttcagtcattgattatttaagttataagccagcgaaaaaatagtactgataattaaatattagggtgtgaaggaatggaatatctaaaaaggcttgcattgttaataagtgttattattttgaccatttttataatgggttgtgatagtcaaagcgatactgcagaaaatccaaaagaaggttcaaaagaagcacaaattaaaaagagtttttcgaaaacgttagatatgtatccaattaagaatctcgaggatttttatggcaaagaaggatatcgagatggcgaatttaaaaaagatgataaaggtacttggctaattagatccgaaatagttaaacagccaaagggcaaagtgatgaaaacaagaggtatgcaattatatattaatagaaataccgaaacagccaaaggtttctttgttttgaaagaaataagtgaaaataataatcgtgtaaataaagataaggaggaaaaatacgaagtgaaaatggtaggaaataaaattattcctactgaacaaattaatgacgagaaaataaaaaaagaaattgaaaacttcaagttttttgtgcaatatggaaactttaaaaatttcgaaaaatacaacaatggtgagttttcatataatcctgaagcaccaatttattcggctaaatatcaattacacaacgatgattacaatgtaaggcaactacgtaaaagatatgacatttcaacaaaagaaacaccgaagttacttttgaaaggtggaggagatttaaaaaattcctcagttggtcaaaacgatattgaatttacttttgttgaaagaaaaggtgagaatatttattttaacgatagtgttgaattcataccaagtaagtaaagttaaattaaaatgtgtggttagatgaaatgatcaaatatcaaaaaatgtgcaaagagatgtgacaagatgaagtgttttcagaaattatacatatttatattaattttaatcgtattaatggcaggatgcgaaagtaataagatcactggagattcgaaagaaacacagatcaaaaagagctttgcgaaaacattagatgtataccctacgaaaaatctagaagatttttatgacaaagaaggatatcgagatggcgaatttaaaaagggtgacaaagggaagtgggttattagatctgaaatgacaacagaactgaaaaatgaaaatatggtatctaaaggtatggtcatacgtttaaatagaaatagtagaacatgcactggtgaatattttgtcaggatagttaaagaagacagtgagggcaaggtatatagtgatgaacgaaaatatccagtgaaaatggaaaataataaaatcattacattaaaaccaatcgatgatgaaaaagtaaaaaaagaaattgaagaatttaaattcttcgtacaatacgggaatttcaaagaattggaaaactataaagacggagaagtgacatataacccagaagcaccaatatactctgcacaatatcaattgaaaaatagtgattataatgtagaacaactacgtaagcgatataatataacgacgaaaaaagcgcctaaattattattgaagggttcaggtaatttaaaaggctcatcagttggatataaaaatattgaatttacctttgttgaaaataaggaagaaaatatttacttcacagatagtattaatttcaacccaagtgaggataaataagtatatttagtattacaaaaacgttagaaaaattaataataaagttaaattaacaaactgtattaaattcatatagtcagttttgtttgatgacatgatagtagaaaaattattattttaataggttgtatgaactatacaaatatttataaaaattaaaacagagagatgtgaaatgatggggtatataaaaagaatggctttatacatgagtgtatttcttttaatcatttttattgttggatgtcgaaatatgaaagatgaacagaaaaaagaagaacaaacaaataaaacagattcaaaagaagaacaaatcaaaaagagttttgagaaaacattagatatgtatccaattaagaatctcgaggagttatacgacaaagaaggataccgagatggcgaatttaaaaagggtgataaagggatgtggacgatatatacagatttcgccaaaagtaataaacaaggtggattgagtaatgaaggtatggtcttatacttagatagaaatacacggactgcaaagggacattattttgttaagacattctataataagggcaaattcccagatagaaaaaattataaagttgaaatgaaaaataataaaattatcttattagataaagtagaagatacaaatctaaaaaagagaatagaaaactttaaattttttggacaatatgcaaaccttaaagaattgaaaaactacaacaatggtgatgtctcaattaatgagaatgttccaagttatgacgcaaaatttaaaatgagcaataaagatgaaaatgttaagcaattaagaagtcgttataatattcctactgataaagcaccggtattaaaaatgcatattgatggtaatttgaaaggaagttctgtgggttataaaaagttggaaattgacttttcaaaaggtggaaaaagcgatttgtcagtaatagattctttgaatttccagccggcgaaggtagatgaagatgatgaatgatgaggatggtgtgtaacaatgaagtctataaaaaggattggattgtgcattagtttgttgattttaatcatctttgttacatcttgtgatggtgataataagatcattggagattcaaaagaagaacaaatcaaaaagagctttgcgaaaacgttagatatctaccctattaagaatctcgaggatttatacgacaaagaaggatatcgagatggcgaatttaaaaaagatgataaaggtacttggctaattagatctgaaatgaaaatccaattaaaaggagaaaatctggaatctagaggagcagttttagaaattaacagaaatactagaacggctaaagggcattatattgttagagaagttgttgaagatagcgatggaatgacacacaatcatacaaaaagatatcctgtgaaaatggaaaataataaaatgattccattaaaaccaatcgatgacgaaaaagtaaaaaaagaaatcgaagaatttaacttctttgtacaatacgggaatttcaaagaattggaaaactataaagaggacgaagtgtcatataacccagaagtaccaatttactctgcaaaatatcaattgaaaaacagtgattacaatgttgaacaattaaggaagcgatataatatcccgacgcaaaaagcgcccaaattattattgaaaggctcaggtaatttaaaaggttcatcagtcggatataaaaatattgaatttacctttattgaaaacaaggaagaaaatatttacttcacagatagtatctactttaatccaagcgaggataaataaatataattactaatataaaaaataacgttagaacatttaataataaagttaaaatgaattacatgtattaaattgaataagttagttttgtttgataacataaaagttgaataatcactattttaataagttgtatgaaatattcaaatgtttataaaattaaaacagagagatgtgaaatgatggagtatataaaaaaaattgctttgtacatgagtgtattacttttaatcatttttattgggggatgtggaaatatgaaagatgaacagaaaaaagaggaacaaacgaataaaacagattcaaaagaagaacaaatcaaaaagagttttgcgaaaacgttagatatgtatccaattaagaatctcgaggatttatacgacaaagaaggatatcgagatggtgagtttaaaaaaggcgataaaggtacgtggactatacttacaggtttttcaaaaagtaacaaaccaggagtattagatgatgaaggcatggtgttatatcttaatagaaatgccaaaaaggcaacaggttattattttgtaaataaagtttatgatgatattagcaaaaatcataatgagaaaaaatatcgtgttgaactaaaaaataataagattgttcttttggataatgtagaagacaaaaaacttaaacaaaaaattgaaaattttaaattttttagtcagtatgctgattttaaagatttaaaaaattatcaagatggaaatataacaactaatgaaaacgtaccgagctatgaagcacaatataaaatgaacaatagtgataaaaatgtaaaaaaacttagagaaatttatccaattacaactaataactctccaaatctaaaattatatatagatggtgatataaaaggaagctcagtaggatataaaaaaatagaatataaattttcaaaagataaaggtcaagagacaacattaagagattatttgaattttggaccgtctgaaggtgagaatgttgagtaggaagtataaaatagatttaaaagcaattaatcaaaatactgagtctacaagtgctatttcgaaagcgtcatacgaagttgagaatgctaataataatggtctatcaaaaagagacgtgattaatcaatttaatgatttgaaaaaaatgaaaaaattcccttctaatcttgaatatgttgatagttacactgattctcttactggagtaacaacttctgcttttttaaataaagatacaggcaaagtaactctcgggatgactgggactaatttacaagacgaagcctttaaaaagttaaaagaaggtgaattttcaagacaaaatgttaccaatgctttggaaacagttaaagatggatatgcagatcttaaaatattatattctcctgcatctgatcaaaactatagatatgcgaatacacaagaatttataaataaaataaaaagtaagtatgacattgattttattactggacattcactaggtggaagagatgcggtagttctaggaatgagtaatggtattccgaacattgtggtttataatccagctcctatttctataactagtttgaatcctaattccccagatggaaaacgtttattagaattatataaaaattataaaggtaatattactaggtttgttgcagaaaatgatgcattgacagaaaatctgaagaaatataagcattatgtttttttcggtaatgataaagtctttaaaaatggtaaaggtcatgaaatggaaggctttctgaccgaagaagaacaaaaagctataaaaaaagaacttaaaaaactacaaggttatgcagaagaaaataataagtcatttgtaaagaattcaaataatgctatctctaaattagctagtatagaattacttagagcaaatatgatgactacaaatggaggaggattatcttcttcgcagcaaaaagttttagaaagtttaacagctttaacaattgcgcagtcattcagtcaactgatagacgatgaaattaatcaaatcaaaaaaatgtataatgaaaagaaaaagaaatttggaaaaaattgggaagacgctcaaaaagctggaaaagctgtaggtgaagatttgagtgtaaatggagttctcaatgctttagatgaaggtcaagtgaatgaaagtagtatggtaagagaacctgaacaaatgatatctgcaaaagaaagacaactttcaacgatagggtcttctgtatcaaattatattatgagagttagactcagtattaatgaaatcgttgataaagatcaagtgcttgcatcacaaataggtggattactatgatgtttaatcaaattaataataaaaatgaattagaagaatcatatgaatctgagaaaaaacgtatagagaatgaactgcaaaatttaaatgaacttaggcatagaactcgaaaagaaaatgagcgtagttatgatgtttttcaatatttgaagcacgaaatgaattatagtgaagatgcccaaaggaaaatgacgagaaatatagaagcgtatgagcaagaaatcaatgagataattagaaagcaagaatggaaattagaagaatataaagaagacttaaaaaagtcttatgaaaagcagttagataagctaagtgactgataatttggaggagattaaatgactctaatagaaccagatatgaccttaagaatgccagatataagtactacagtagaaacacttaatctcatatctaaaatggaagcgcaaaaagaaaatattcgcacagttattgcacctgaacataagcataaatacaaagatattgaaaacggattaaaaggtgaagaaaaagtattaattgaacaaatggcgcaacattgcgaagcttttaaagctaattttaaaggtgcagctcaaggagattgggttaaaagtgccatgtctgagatagacagcattaaggatgacctgaaaaaaattaatagctaaactacatatcatactactaaataaagcgaccaatgttcagtatattcacaactgacactaggccgcttctttttaatttatattattcccatgtaaagtaattcgaaccgaatcgaaatatcacactctcaattgtaaaaaaacaacttaaattactgtcccgcattaaacatgaccacattcgtaacagcaacaataaaaatcctcaagtactaaaagctatgatcactttatcaaaatcaacgcaagttaacctctcccgaactacccgttactcatcaccttcaccttacaaaccataaagcgctgcagttaagtattgaatggcatagccaattgaaatgaaaatagcaatcgttataatagcactgccaatggtatataaagtatgtttcgtagataatccttcagtctttgaaccaaaaacactgagtagaataaatgcaataccagtaacatataaaactaaaatgacaaataacatgtttatacacctcgattctctttcgtgagatatatctttgtctccattataaagtaaagcgctcaataatttaattaagtatactatttttttattatcgaagattgcgaaagaggaaacgctcctatataatgtaaaacggaattattcctatttacaaataaattgaagtgagggtatatatatggctaaaattccagttacggtattaagtggttatttaggctcggggaagacaacgttgttaaatcatattttacaaaatcgagaaggtcgacgtatcgcggtaattgtaaatgatatgagtgaagtaaatatcgataaagatcttgtcgcagatggtgggggactatcgcgtacagatgaaaaattagtcgaactttctaatggttgtatctgttgtacacttagagacgatttattaaaagaagttgagcgtttagtgaaaaaaggtggcatcgatcaaattgttattgagtcaacagggatttcagagccagtacctgttgcacaaactttctcatatattgatgatgaacttggcattgatcttacagcgatttgccgtttagatacaatggttacagttgtggatgctaaccgcttcgtacatgacatcaactcagaagatttattgatggatcgtgatcaaagcgttgacgaaacagatgagcgttcgattgctgatttattaattgaccaagttgaattttgtgatgtattgattattaataaaattgatttaattagtgaagaagaactagcgaagttagaaaaaatgttaagcgcattgcaaccgactgctaaaattattaagacaacaaattctgaagtagatttaaaagaagtcttgaatacgcagcgttttgattttgaaaaagcgagcgagtcagcaggatggatcaaagaacttgagtctggtgggcatgcatcgcatacacctgaaacagaagaatatggtatatcatcgtttgtatataaacgtcgtctacctttccatgctaaaaggttcaatgattggttagaaagcatgccaaataatgtcgttcgatcaaaaggtatcgtatggctagcacaatacaatcacgtagcatgtttattatctcaagcagggtcatcttgcaatattcatccagttacatattgggtggctagtatgtctgaagcgcaacaaacacaaatattagcagaacgtcaagatgtcgcagctgaatgggatccagaatatggcgatcgtcatacacaatttgtcattattggtacagaattagatgaagaaaaattaacaaaagaactcgacgcatgcttagtcaatgcgcaagaaattgatgcagattggcaacaatttgaagatccatatcaatggcaaattagaccagcacgataagttgaatgaagtataatcatttttgaattgtggcttaattgtttgcaatttatgacaattaataaaaagttaaggtgttcttaggatctttttgttttcaatctatctaaagtgtgatagttttgataaagcagaaatttgcattttatccatagggctaggacatgtatgtgtcttagtcctttttatatttacgttgatgaaaaatggcaaaaccatcgtaccaactgttaattgaaggtacaatcattgtttaacagtcataaaaatgagtgaagtaaatgcagctatcaatgtactattaacacttacggtcacacgagtgtttcagtctaaacgtgcaacgcaattccgcacgtggccaatatatcttgcgctagatcatgaaaatcattaagatttcgcatgccaaatcatgaatgtctcagaactcgagtatcaaacataaaacacgccacaaaaatataacgcgtcagactacaaagatcacgaatattccgtatgtcccactaagaacgtcctatacaaaaaacaccaagaccatttatttgcaacaaactaacaagactcacctcacatcaataaatcaacacaaagcaaagccaccatccctattggtatagtggcctgagaattttaagtattcaattcgcttaaattattttgcgaaaatgtcgataattgctttgatgattttaatgatagtacctacaatagccatcgttttgtcctcctgtatgttgatttaacatagtgatgagttgttgatcgttaatgtttgagattagttgttacctaaaaatttaccaagtaaatctttaaagaatttgaataattttgctacgaattccatgtgaatggcccccttcaaataagatgttcatatctatgagatttttataacttacttaccagtgaatttctcaattaatcctttaatgaatttaatgattcctgcaatgatacccatgtgaaagacctcctttgtttgttatgaaatcttatttaccagtgaattgttcgattaagcttttgataactttaatgatgccagcgatgatacccattaagattacctcctttgcttatgagttaacttcattgtacatagttatcttgtgcgtaattgatttttttcctaacttgaattgttatgatcataactgcgaattttttattttaaaaggacgggaaatactgcctaactgtacaggtgcatttacaaaatctttacaatcattggtttaatagaggttaagctcatgaatttgacatgaagcagaaatttaattatattttatgttataagtttaaaacgaataacacgttaggtctcgtctaggcaaagcatatttatgaagatgaattgaacagacagaagtaacattttatatacatatgtgcatgggagcacgcttaaagagaacactgcaacaaggtatatcaacgtaccgtgatgcagtgtctagttaaactgaaacctgcaatagtaaattttctgccattatgtacagaatctactattgtaggtttttatttttatacataagcaattatgcgagagattagaaataaggaggttatgcagtgttaagttttcaattgctattttcactgtttgttattgcgcttatcattgcattgataagtggcttgttgtttttagcaccagttatgccaatgagatatattaaattacatttatacatactagtcatgccagtattatttgcagtcattggctttttcggtattcatggtcaacatgtcttaggtccatttaaaatagatcgtttatcttggttattagctggctttgtaatggcgcttggctttattattcaaaagttttcaatgcgatatttactaggtgatcatcattatagacattactttccattgttcactgcgattacgtcgtttgcatctttagcatggatgtctgaagacttaagactgatggcactctgctggggtattacattattatgtttaacattgctgatgaacgttaatcgtttttggaaagtgccacgtgagtctgcgaaattatcaagcatgacatttttatgtggttggcttgcattcgttggagcaattgtaactatttatattgcgactggcgagtggcgggtaccacaacatatagttcatccgacatggtcattgttgacgaatgtactacttgtattagctgtcatgataccggcagcacaatttccttttcatcgatggttgattgaatctgtaacggcaccaacgccagtatcggcaattatgcatgcaggaattgtgaatgcaggtggtgttattctaactcgttttgcgccgatatttgataatggatttgcgttatcattattacttatcctttctagtatttctgtattgttaggatcggttattagcttagttcaagttgactataaacgccaattagtgggctctacgatgagtcaaatgggctttatgttagttcaatgtgcattgggtgtatattcagcagcgattattcatttaatattgcacggtatttttaaagcaacattatttttacaatcaggttctatcgtgaagcgattcaatattccaaaacaagcatctgctaaagacgcttatggctggattgtcatgggacgtgtattagctattatcgtggcatttctattttggatgagtagtgacagaagtgcatatgaagtgttaagtgcactcattctaggatggtcattacttgtatcttggaatcaaatggtagcctttagtaaaggacgcatggcacgtcttgttggtatgattttgattgcaatcgtgacatttatctacgtcatcacacataattatttttacgctgtattacaaaatataacaacacatgcgacaacgccgcctacagtgagtgtcatcattagtgttgttattttaatctttggcagtttattaagtatttgggtggcgcggcatcgatactctaaggcttttgcggtattgtacgtgtggttagttaatctaggtgaagcacgctcgaaagcgatagaaagtcatccgaattatttgaagaagtatttataggaggtgaaaggtatgacaacacagttaaatatcaattcagtcattgaaaatgcgaaacgtgttattacaccattatcaccaatttcgatttttgcagcacgaaatccatgggaaggattagaagcggatacgtttgaagatgtcgcaaaatggttacgtgatgttcgagatgtggatattttcccaaataaagcattaatagaaagcgctgtggcacgtggtgaattagatgaaagtgtctttaatcaacttgttactgatatgttacttgaacatcactacaatatcccgcaacactacatcaatctttatattgataacattaaaacattaaaagacgtacctgcatcatatatgaatcattcaaatgttgatgttgttgctgatctactattagaaaaatcaaaacgtgatatggctgaatcatatcatcactatgatgtacgtccgatgagtgatgcaataatagatgaacaaggtgagccacttagcgaacaagtgaatcgtcaaatgattaaatggacgaaactttatatcgatcaatttctatcgagttggacaatgccgaagcgtgagcaaagtttttaccatgcatggttgcatttagcgcaacatgaccatagttttactaaagcacagcgccaagtgattaaaggcttacccaatgatcctgaaatgacgatagagtcagtattaactcatttttcaatagatcaggaagactaccaagcttatgttgaaggacatcttttggcgttaccgggttgggcaggtatgttgtattaccgttcacaacagcatcactttgaacaacatttgttaacggattatttggcaattcggttagttgtcgaacaattgctagttggtgatgagtttaagtcagtcgctaaagattgtgaaagtagatcggaaaattggtttaagcaaactgttgcatcatggtgttactacagtgatatgcctagcgatgtattactacaacatgacgtcaatgaaattcaaacgtttattcattttgcagcaactatgaataaaaatgtatttaaaaatttatggctaattgcctgggaaatgacatacgaatctcagttaaaacaaaaaattaaagcaggtcatgaaagtgtggcgggcgcattagatgtaaaccaagtaaatgtctcagaaaatgataacgctaatcagccacattcagtattgttaaatgacacacaagcagttgatgaaaataatagcgagctaaatcagatgggcacatcaacgaaagcgcaaattgcattttgtatagatgttcgttcagaaccatttcgtagacatatcgaagcagcagggccctttgaaacgattggtattgcaggcttctttggattacctattcaaaaagatgccgtagacgaacaattcaaacatgattcattacctgtcatggtaccgccggcatatcgcattaaagaatttgcagaccgctacgatatgaatgtttatcgacaacagcaacagacaatgtcatcgatgttttacacatttaaattgatgaaaaataatgtcatgcctagtctgttattgcctgaattaagtgggccatttttaagcttaagtaccattgtcaattcgattatgcctagaaaaagtcgcgcgtctttacaaaaaataaaacaaaagtggttgaaaaagcctgaaacaaagttgacgattgatcgtgagtttgaccgaacatcagacttacctgttggatttactgagcaagagcaaattgatttcgcgttacaagcgttgaaattgatggatttaaccgaagcatttgcgccgttcgttgtgttagcaggtcatgctagtcattctcacaataatccacatcatgcatcacttgaatgtggggcttgtggtggcgcatcaagcggttttaatgctaagttattagcgatgatatgtaatcgtccaaatgtcagacaaggattaaaacaatcaggtgtgtatattccagagacaactgtttttgcggtagcagaacatcatacgtctactgatacgttggcatgggtatatgtgccagacacattatcttctattgctttagatgcatatgaatcattgaatgacgcgatgccgatgatttctgaacacgcgaatcgcgaacgtttggacaaactgccaacgattggtcgtgtgaatcatccagtggaagaagcgcagcggtttgcgagtgattggagtgaggtacgtccagaatggggattggctaaaaatgcatcatttataattggacgacgccaattaacaaaaggcattgatttagaagggcggacatttttacacaattatgattggcgtaaagataaagatggcacattattaaataccatcatttctggtccggcacttgtggcacaatggattaatttacaatattatgcgtcgacagttgcgccgcatttttacggaagtgggaataaagcgacacaaaccgtcacgtcaggtgttggtgtcatgcaaggtaatgcgagtgatctgatgtatggcttatcatggcaatctgttatggctgctgatcggacgatgtatcattcgccaattcgtttacttgtcgttattcaggcacccgactatgttgtagcaagactactcgcgaataatgagcatttcgctaggaaggtgtctaatcattggctgcgtttaatgagcgttaatgaggaagggcgttttaaaagttggatttaacgatgatatgttgcgatgctaagtaactaatatatcatcatatctacaatgttctagcttcttaaaatatactaaaaatgataaacttaatgtaatagttgatgtcgtgataacgatacaaagatgaagtaatcaattttaatattattggagttagtgatatgaaaagaacgaaaggtgaaatcgaagctgaaatcagtaaagccattacgcaatgggaaaaagatttccttggcagaggttccttgtcagttaaatcagacattttaagagatatggtgattattagtttacaaggtatcttaacgccagctgaatatcgtgtatgtagtacgaatgaaggattattaaatattaaacgaacacgttctgaattagttgaatccggtgagcaagatttgaatgatatcatttttaaaattacaggtatcaaagtgatgagcttccatagtgatttaagtacagttacaggtgaacgtattatcgtattcaaacttgaggataatttggaaaagcatatttaagaaggttaggtatgcttctgctggcttattaaagctatagaagtatgcttggttaaacagcgcaacgccatatatttgggtgtgctgtttttctattacatgatgtgtttattacgtggatgaatgcgtgggtctgaatatagcccgtgaaaggcgtatgtcataaaatttgcgaatggtgacaagtcgacgcaagcatatttgttgcgagacatgcccactatccttttacataaagagtatatgtgtgacgtaggcatataatcgataaagtattcctaaaaaattaggtataatgaccattgttgcaataagtttttcggccttgaaaccgataacgcatagtataataggaataaaatataatacaaatatccagtaaatcaaatttgaaaatgatggatgaataggggtaaagaatctaactaatgtaatgattaacgctatatagacaaaaataactctattgatacgccttaccccctctgtataataaatataaatcgtactaaattgaaaatagcaaaatattgttatttcaattatacaatgttttatttgcaatatacataacaatatgaactttataattttgatattgtcggtaaagtgaaatttgtggcacattgatattatggataacatttgtaaaatgaaaatgatgatacgaggagattgtaagatgatagataaaaaattaacatcaccgaaaatgacagtgcctttatttttaatcgcgctgattgtatttataggtatgttttacagtgtagtgacaaatcaagaatggcttaaaaatatagatatgggatcattaacatggtttacagattatttcggtgagccacaacgtcagtatgttaacaatttgtttaattactatatgacgtttagtgcggaaattggagatgtcaaaggtgtcgtgttgatttccattatcgtcacaatcatactgtttattaaacagaggcatttagcggtttggtttgtgacatatttggtttcaggtgtcatcatgaacaaattaattaaagatactgtattacgtccaagaccatataatcatttagccgttgatacaggcttttcatttccgagtggacattccaacgccagcacattattatatttcgccttaatgatcattattatttcacttgctgctaagacaataacaaaagtgttgagtgcgttggttatgggaatattatggcttagcatattattttgtcgcctttattttcatgcacattacttttcagatgtcattggcggcacgtcactagcaatcatttgggtagcgttattcttaatggtatacccatactttattaatcatcgacgacaacgcgtttagcaaacatctttagacatagtggaggtatatagaaaaatgagaattaaaacaccgagtccatcgtatttaaaaggcacaaatggacatgcgatattattattacattcatttacaggtacaaatcgggatgtgaagcatcttgcagctgagttaaatgaccaaggatttagttgttatgcaccgaattatccaggtcatggtttattgttgaaagatttcatgacatataatgtagatgattggtgggaagaagttgagaaagcttaccaatttttagtcaatgaaggttatgaatctatcagtgcaacgggtgtgtctttaggtggattaatgacattaaaattggcgcaacactatcctttgaaacgtatcgctgtcatgtcagcaccaaaggaaaagagtgacgatggcttaatagaacatttagtttattatagtcaacgcatgtcgaatattttaaatttagatcagcaagcatcgagtgcgcaattagcagcaattgatgattatgaaggtgaaattacgaagtttcaacattttattgatgatatcatgacaaatttaaatgttattaaaatgccagctaatatattatttggtggtaaagatgcgccatcctatgaaacaagtgcacattttatttatgaacatttaggatcagtagacaaagaattaaatggtctgaaggattcgcatcatttaatgacgcatggagaaggcagagatattttagaagaaaatgttattcgctttttcaatgctttaacataattgaatattttaaaaattaacacttgagtgacgatgttattatatttgtcatttgagtgttttttgtggcgtgatagtatagggaacttagctaaagttaatttgtagtgtgatgtcgtggaaatattatggagttataccagaagttgatttgtattgtaatgtcgtggaaattttacgggcattgcacctgaagttgttatgtggcgagatgttggggatatagatggtgttgtatgtggcgagatattggcgcacgtatacagcgttgaaccagaaaatttaatgtagcgtaatgacaacacattacaagagttgattatattatgataaatccaggtgctaccgtattaatgaaacaattttgatgcaggtgtattgcatgttatttacatacatgttagagtgttacttaaacacgtagacgctttaacgctttaaaggagatgtgaatgatgaaaagacaacaatcacaatggaagtcatcaactggatttattttagctagtgcgggttctgcaatcggtcttggtgccatgtggaaattcccatatatggcagggatttatggcggcggtgcctttctagctatgttcttaatattcaccatttttgttgggttgccattactcattatggaattcactgttgggaaaatgggacggacatatacaacacaaatatatagtaaattaactggtaaaaaatggctcaatatcattggctggaacggtaatttggcagtgtttattttatttggcttctatagtgttatcggtggttggattgtcatttacatcggacaagtattatggcaattagttatatttcaacgcatcaatcatctccaagaaatgaattttgaagcggtaatatcaaatccttggttaaccgttctagggcaaggtatattcatattcgctacgatgattattgtcatgttaggtgttgaaaaaggattagaaaaggcatcgaaagttatgatgccattgctgtttgtctttttaatcgtcattgtgattaagtctttaacattagatggcgccttagaaggtgtgaaatttattttacaaccaagagtatcagagattactgctgatggcatcttgtttgcgctaggtcaatcattctttacgttatcattaggaactacaggtatgattacttatgcgagttatgcctctaaagacatgacgattaagtcatcagctatttctatcgttgttatgaatatctttgtatctgtattggcaggtctagctatatttccggctttacatagttttggctatgaaccacaagaagggcctggattattatttaaagtactgccaatggtctttagtcaaatgcatctaggcacattattctatttgggattcttagtgctgttcttatttgcggctttaacgtcatctatttctttattagaattaaatgtttctaacttcacgaagaatgacaatacaaaacgtaaaaaagtcgcagtgatcggtagtattttagtatttatcattagtattccagcaaccttatcttttggtatcttaaaagatgtaagattcggtgcgggaacgatttttgataatatggatttcatcgtttcgaatgtattgatgccattaggcgcattaggtactacgcttgtcgtaggacaattattagataaaaaattattacaacaatattttggtaaagatcgatttagattattcagtggttggtattacttaattaagtatgcgatgcctgtcgttattattttagtctttatcgtgcaattatttagttaatatatagaagcatctgacacacaagtatttgtgttgctcaggtgtttttttgtttggaattgaaaatttagtactggttctgaattaatcgaaacttagataattgcaaaataacaaaatgtcgtttataattcttatctgaaaagtaagaattaaaattgagacatgaagaaaggtttcattcatttgatcggcatgtcagatgagggtgcatctatgattacttatgatttaattggcaatacaccattagtactgttagaacattatagtgatgataaagttaaaatttatgccaagcttgaacaatggaatcctggaggcagtgttaaagacagactcgggaaatatttagtagagaaggcaattcaagaagggcgtgtgcgtgcaggtcaaactattgttgaagcgactgctggtaatacaggcatagggttagctattgcagcgaatagacatcatttgaaatgtaagatctttgcgccgtatggtttttcagaagaaaagattaatattatgatagcgcttggtgcagaagtttcaaggacgagtcagtctgaaggtatgcatggggcacaattagctgcacgttcctatgctgaaaaatatggtgccgtttatatgaatcaatttgaatccgaacataatccggatacatattttcatacattgggacccgaattgacttcagcattacagcaaattgattattttgtggctggtattggctctggcggtacatttacaggtaccgcacgttatttaaagcaacatcacgtgcaatgttatgccgttgagccagaagggtccgtgttaaatggagggccagctcatgcacatgacactgaaggtatcggttctgagaaatggccgatatttttagagagacgtcttgtagatgggatatttacgattaaagatcaagatgcctttcgaaatgtcaaaagtttggctataaatgaagggttgttagtaggcagttcttcaggtgcagcattacaaggtgcattgaatttaaaagcgcaattatctgaaggtacgattgttgtcgtatttccagatggtagtgatcgatatatgtctaagcaaatatttaattatgaggagaataataatgaacaagaaaactaaattaattcatggtgggcacacaacagacgattatacaggtgccgttacaacaccaatttatcaaacaagtacatatttacaagatgatattggtgatttacgtcaaggatatgaatattctcgtactgcgaatccaacaagaagttctgtagaaagcgttattgcgacattagaaaatggcaaacatggctttgcatttagttcaggtgttgcagcaatcagtgcagttgttatgctgttggacaaaggagatcatattattttaaattcagatgtatacggcggtacttatcgcgcattgacaaaagtatttacacgatttggcattgaagtggattttgtagatacaacgcatacagattcaattgtacaagcgatacgcccaacaacaaagatgttgtttattgaaacaccttctaatccattattacgtgttactgacattaaaaagtctgctgaaattgcgaaagaacacggtttgatttcagttgttgataacacatttatgacaccttattatcagaatccattagatttaggtatcgatattgtcttacattctgcaacgaaatatttaggtggacatagtgatgtcgttgctggtttagttgcaacatcggatgacaagcttgcagaacgtttagcatttatttcaaattcaacaggtggcattttaggacctcaagatagctatttacttgtgaggggtattaaaacattaggtttacgtatggaacaaattaatcgcagcgttattgaaattattaaaatgttacaagcacatccagctgtgcaacaagtgttccatccaagtattgaaagtcatttaaatcatgatgtccatatggctcaagcggatggccatacaggtgtgattgcatttgaagtgaaaaatacagaaagtgccaaacaattgattaaagcaacatcgtattacacattagctgaaagtttaggtgcagtggaaagtttaatttcagtacctgcattgatgacacatgcatccattccagcagatattcgagctaaagaaggtattacagacggacttgtaagaatttctgtaggtattgaagatactgaagatttagtcgatgatttaaaacaagcactagatactttataaataatagcagcactggcatatattttgagttcaacgtttgttgttcttgaatatgctagtgcttttttgtgcgatgttaatatttagtaattgcgttgtggaggattggtggacatttttatggatttaatttgataaatgtcatagtagtctcacaattcgtcattgtcacatgaattacttattttttaattttttagaaaattcggcaaattgtattgacgatatatgcaattttacatataatgctcttattcctagtggattaataagaatttgtaggaggggcgatgatgattgagtttcgacaggtaagtaagacctttaataaaaagaagcaaaaaatagatgctttgaaggacgtatcatttacggtcaatcgcaatgatatttttggtgtgattggatatagtggtgcaggaaaaagtacgttggtaagactcgtgaatcatcttgaagctgcctcgaatggacaagtgattgtagatggacatgatattacgaattatagcgataaaatgatgagggatattaagaaagatatcggtatgatatttcagcatttcaatttattaaattcagctaccgtatttaaaaatgtagcaatgccactcattttaagtaagaaaagcaaaacagaaattaagcaacgagtaacggaaatgcttgaatttgtaggattgagtgataaaaaagaccaatttcctgatgaattatctggtgggcagaagcaaagggtggctattgcaagagcgcttgttactaatccgaaaatactcctatgcgatgaagcaacaagcgcattggatccagcaacgactgcttcgatattgacgttattaaagaatgtcaatcaaacctttggcattacaattatgatgattacacatgaaatgcgcgttattaaagacatttgtaatcgtgttgctgtaatggaaaaggggaaagtggttgaaacaggaactgttaaagaggtgtttagtcatcctaaaacgacgattgctcaaaattttgtgtctacagttatacagactgagccaagtacatcattgattcgtcgattgaatgacgaacaagttggcgattttaaagattataaaatcttcgtcgaggaaactcaggtgacacaaccgattataaatgacttgattcaaatttgtggcagagaggttaaaattttattttcatctatgtcagaaatacaaggtaacaccgtatgttatatgtggcttcgatttaatatggatcaacaatttgaagacacggcaataaatcaatatttcaaagagaaaaatattcaatttgaggaggtgcattaacatatgtttggttctgatttagacagtgcacagttattacaagcattgtacgaaacgctatatatggtatctattgctttatttttaggagcagtgattggtattccattaggtgtcttattggtaattactcgaaaacaaggcatatggcccaatatagtgatacatcaagttttaaatcctttaatcaatattttaaggtcaataccatttattattttgttaattgcgattgtgccattcacaaaattagtagtaggtacttcaattggtacgactgctgccatcgtgcctttaacagtatatgtggcaccttacattgcaagacttgttgaaaactcattattggaagtagacgaggggattattgaagcggcgaaagcgatgggcgcttcaccactacaaatcattagatattttttaattcctgaagctttaggttcgttagtattagcaattaccactgcgattattggacttattggaagtacggcgatggcaggagctgttggcggtggtggtataggagacttagctttagtgtatggttatcaaagatttgatacgacggtcattattattaccgttattgtattagtcattattgtccaagtgattcaaacgctagggaatgttctagctagattcatacgtagacattaatgatatatagtgaagattttgaaaggaattgatagaatgaaaagattgattgggttagttatcgtagcacttgtattattagcagcgtgtggtggtaacaatgataaaaaagtaacaattggtgtcgcatcaaatgacactaaggcttgggagaaggttaaagaattagctaaaaaagatgatattgatgtggagattaagcacttctcagattacaatttaccgaataaagcattaaatgatggtgatattgatatgaatgcattccaacattttgcatttttagatcaatataaaaaggcgcataaaggaacaaagatttcagcattaagtacaacagttttagcaccgttgggcatttactcagataaaattaaagatgtcaaaaaggttaaagatggtgctaaagttgtcattccaaatgatgtgtcaaaccaagcacgtgcacttaaactattagaagcagctggtttaataaaactgaaaaaagatttcggattagcaggcacggtgaaagatataacgtcaaatccaaaacatttaaaaattactgcagtagatgcacaacaaactgcacgtgctttatctgatgtcgatattgcagttattaataacggtgtagcaactaaagcgggtaaagatcctaaaaatgatccgatatttttagaaaaatcaaattcagatgcagtaaagccatatattaatattgttgcagttaatgacaaagacttggataacaaaacatatgctaaaatcgtagaattgtatcattcaaaagaagctcaaaaagcgttgcaggaagatgtcaaagatggagagaaacctgttaatttatctaaagatgagattaaggcaatagaaacgtcattagcaaaataaattatattgcgtcctacaagcaaagttcatgcttatgtttgtagggcgttattgttggagaataaaattatttccaatagagaaagggattgtaatcattttatagtgaaatattatgaaattgtaataatttagatattgtaaaatctaataagttgtaataattttaaggggtaattataaaatttgatgatacagtatatgatttttttgtaatcataatgtcatcaaacatcaacctattatacataataaaatcgtataatgatgtagtattcataaattcggataaaagaatgttaggaaagttaagcaagaggaggattttaaagtgcaaaaaaaagtaattgcagctattattgggacaagcgcgattagcgctgttgcggcaactcaagcaaatgcggctacaactcacacagtaaaaccgggtgaatcagtgtgggcaatttcaaataagtatgggatttcgattgctaaattaaagtcattaaacaatttaacatctaatctaattttcccaaaccaagtactaaaagtatctggctcaagtaattctacgagtaatagtagccgtccatcaacgaactcaggtggcggatcatactacacagtacaagcaggcgactcattatcattaatcgcatcaaaatatggtacaacttaccaaaacattatgcgacttaatggtttaaataatttctttatttatccaggtcaaaaattaaaagtatcaggtactgctagctcaagtaacgctgcgagcaatagtagccgtccatcaacgaactcaggtggcggatcatactatacagtacaagcaggtgactcattgtcattaattgcatcaaaatatggtacaacttatcaaaaaattatgagcttaaatggcttaaataatttctttatatatccgggtcaaaaattgaaagtaactggtaatgcatctacgaactcaggatctgcaacaacgacaaatagaggttacaatacaccagtattcagtcaccaaaacttatatacatggggtcaatgtacatatcatgtatttaatcgtcgtgctgaaattggtaaaggtattagtacttattggtggaatgctaataactgggataacgcagcggcagcagatggttacactatcgacaatagacctactgtaggttctatcgctcaaacagatgtaggttactatggtcatgttatgtttgtagaacgtgtaaataacgatggtagtattttagtttcagaaatgaactattcagctgcaccaggtattttaacttacagaacggtaccagcttaccaagtaaataattatagatatattcactaaagtcttacgtatataaatatataatgaattcctattacatttcacaagctgaaaagttggattgaatcctaaattttatggcggggctatcaaagtcgtgattgttgtaataggaatttttgtatatgaaaaaggattggtcgaatgaacttcatgttctatgttcgaccaatccttttctgaattagtattcatgttttactttgcgaatgcttgtaaataatctagcaccgtttgttattaaagtaacaactgccactgcttttttgaacttacgtggtgacttaattgaaatgtaaaagtctaacacggttcctacagtgcttaaacctaatgaaagatatactaattttttatttttagcatgatatttatagccattgtagccgtcgactatgaaacctgcgacatttagtaaacttgataaacgttgtgatttggaacgttttgccataataataattccccctagtatcttctgtttatatgaaaagttgggtgcgctgaattgctaacgttttgcgctataactactcatatatgataacataattgtacagtataatttgaaaaattgatttcacaaagttggggtgtcaaagatgattaaatgtgtctgtttagttgaagaaacagctgataaaatattgcttgttcaagtaaggaatcgcgaaaagtattatttcccgggtggtaaaatagaagaaggggaatcacaagtacacgcgctgttaagagaagtaaaagaagaattaaatttaacattaacaatggatgaaattgaatatgtcgggacaattgtaggtcctgcatatccacaacaggatatgttaactgagttaaatggatttcgcgcattaaccaaaatcgattgggaaaacgtaactatcaataatgaaattacggatatacgctggattgataaagataatgatgcgttgattgcgcctgctgtcaaagtttggattgaaacttatggtggtaaacatgacaaataatgacaccatcatgttacgacattatgtcccacaagattattcgatgttagaagcttttcaattaagtgaaagtgatttgaagtttgttaaaacgccagaggaaaatattacagctgcaatgtctgataatgaaaggtatcccatcgttgtaatggatggcaggcaatgtgtggccttttttacattacatcgtggaaaaggggtcgcaccatttagcgataaccaagatgcagtatttttcaggtcatttagtgttgatcaacgttatcgtaatagaggaataggtaaagtggtaatggaaaaattggcgtcatttatcacttcaacatttcaggatattaatgagattgtgttaacggttaatactgacaatccacatgccatggcactttatcgccaacaaggatatcaatatatgggagatagtatgttcgtcggaagacctgttcatattatggcgttaactataaaataaattaaatttaaaagcatctttactcatcgtcgaccacaacaattaatgatgaataaaggtgctttttgttatagatcatcggacaatttactatagtaaaaagcgacctagtgaacaattgacatatatccacaggtcgcttaacttaagttatattgctagttgcgattaattgatagactcatcatttttgcgctgtcgagatggtctttttattaaaaatgccgtaatccaagccgtaatcggaatactgattgcaacggcaataccgcctaaaataatagaaataaattcttgggcaaatattttcgagtttataatatgaccaaatgaatatttaagtttgaaaaaccaaataaataaagcaagttggccaccaaaaaaggcaaggtaaatcgtgttcgcagatgtcgctaaaatttctctaccaacacgcatgccagattggaataattcgtattgcgtaagcgttggattcacttgatgcaattcataaatgggtgaactaatggtaattgttaaatctatcacagctgcaataacagcaagaataatagtgaacaccataaattgaaccatatcaatgccaatattcattgaatacacatatgtttcatcttgttgttcggttgaaaagccttgtagatgaccgaagtagaccgataaataaatgagtgtaatcaacaatattgttgtaacgatagtgctgataaatgcagcttgtgttttaacattgtaactattgagtacgaataaattacaagcgccaataataatgcagaaaaagaatgtgacgacataaatcggtacgccaaaaataatcaatacaatactaataattaaaatagcgaaatttaaaaatagggttaaataagagatgaatccctttttacctccgaaaattatcatcagaaagaggagcaataacgccaatataaatacagcattcattgtttcgccctccttaatgtttcaaatatttccataaacaatattgtgataggaattgtaagtacgatacctataccacctgttagtgcgcgcgcaatttctaacgaccaattcatcgaaatagtataagtcactgtattggcattttttaaaaagattaaaaacataggtagtgcaccggataaatatgagaataataagatgttagtcattgttcccataatatcttggccgatgtttcgcccagcaagcgcccatctcctcattgaaatgtgtggcgtacgctgtaaaatttcatgcataccactagcaattgtaattgcaacatccataatagcgccaagtgaacctattaacactgaggctaggaagatatctttcggtggtaatgataaaaagttcatcgtttcatatttaatgcctttaccatctgtcatatatatgattaattctgttaaacctatactcaaaaaagttccgataattgtactggctatggtaatgagtgtacgcatatgccagcctgtaacgagcaataaagtgagtattgttgaacagatcatggcaatggtcatgagtaagaataaattaatattgctatgttgaatatgaatgtaaattgcgattaatatggcaatagaattcaagattaacgataaaatcgattgcagtccgactttgcgaccaaccaataatacagttaataagaacaaaccagtgatgataaccgttaaggtatcacgcttcttttctataatataagcatcactcggcttgttagaaatatgtaataatactttttcgtgtgtgcgaaatgcctcagaatctgcttgcgatttgacgtactgatgattaatcgtcgtcgtttctccagcaaattgaccatttaatattttgacttttaattgatttttatatttaatatcacgattattttgtgcatcttttgtaggtgtcgaagaaacatgtttgacatctataatttgaccaattggtttgttgtaaaagttctcattattgaatgtaaataaaatagcaccaatgaatgcgatgcagaacaaacctaaaattatattaaatggctttgtaaataaatttctatatttcaaaaacaaaaccccaattctatgaatgaattaatatggtgattatacgcccttaattttttattttcaaagatattactgctaagtgtaaaacgaaaatcatcattgatagcatcgaattacttaatggaatgtagacgttttagtcattaattgctgaataagtgttaataatatgccaatatcactctttgtataaggctcctttgtaatagcacatatcgttctttttaattcagtatgatctaattttatatctatccatgatttagattctggtaaatgtatattttgtgatgaaatgatgtaaccttctttttgacgaaggagatactgcgcaagtggttggctactgattgtgtatacatctgatttagtaatcttgcgcaattgtttttttacagtttcggcaaatggtgccaagcaataaatatgactatgctcaaactgaattaatggtgggtgtgtcgccatcgtaattggatcgtctgaaggcgcatataaatgatagtgctcttcgaataaaggtagcatatgtaattgtttgtgtttacgtatttctggtgtaagttccgtgaaaccaatgtctatattcccatttaatacgctatttataattgtgtcatgttctaataagctcggtatgacatgtgtatcattttgtaaatgaaacgtttggataagtggtagtaacatgtgggatacgtcactctcatcatagccaatgtagatacttttatttttagttaatccatggctttgaaattgttcaatcgtgctatctaaatgttcaataatacgcagagcttcattaaataataatttcccttcagatgtgagcgtaatattgcgtccttgctttttaaataaagacacattaagttcttgttctaataatgtaatttgacggcttatcgctgattgagcaatgtttagttcaagtgctgtttcggagatatgttctcttttagcgacctcgataaaatatcttaattgtttaatttccatagcgatataggcacctccaaaaatgagtgttttgtaactattatagcaatattattgataaatgttctattttttagatgaatatcttctattttatatattgaacagataaattttttagattatagtaattatcattaataactaatatcagaatattctaaaaaaggggtgtgcatcatgcacaatgagaaattaattaaaggcttatatgactatcgtgaggaacatgatgcgtgtggtattggtttttatgcgaatatggataataaaaggtctcacgacatcattgataaatcgcttgaaatgttgcgacgcttagatcacaggggcggggtcggcgcagatggcatcactggtgatggcgcaggtattatgactgaaataccttttgcatttttcaaacaacatgtaacggactttgatatcccaggtgaaggtgaatatgccgtggggttatttttttccaaagaacgcattttaggttctgaacatgaagtagtttttaaaaaatattttgaaggcgaagggttatcaattcttggttatcgtaatgtaccagttaataaagatgccattgctaaacatgtagcagatacgatgccagtcattcaacaagtgtttattgatattagggacattgaagatgttgaaaagcgtttgtttttagcgagaaaacaattagagttctattcgactcagtgcgatttagaattgtattttacgagcttatcacgcaaaacaattgtatataaaggttggttacgatcagaccaaattaaaaaactatatacagatttatcggatgatttatatcaatcaaagctagggttagtgcattcgagatttagtacgaatacattcccgagttggaaaagggcacatcctaaccgtatgttaatgcataatggtgagattaacacgattaaaggtaatgtaaactggatgcgagcacgccaacataaattaatcgaaacattatttggcgaggatcaacataaagtgtttcaaattgtcgatgaggatggtagtgactctgccattgtagataatgcgctagagttcttatcgttagccatggagccagaaaaggcagcgatgttactcatacctgaaccttggttatataatgaagcgaatgatgcaaatgtacgtgcgttttatgaattttatagttatttaatggaaccgtgggatggtcctacaatgatttcgttctgtaacggtgacaaacttggcgcgcttacagatagaaatggattacgtccaggtcgttatacgattactaaagataactttattgtcttttcatctgaagtgggtgttgtggacgtacctgaaagtaatgttgcttttaaaggtcaattgaatcctggaaagttattgcttgttgattttaaacagaataaagtcattgaaaataatgatttaaaaggtgcgattgctggagaattaccatataaagcgtggattgataaccataaagttgactttgattttgaaaatatacaatatcaagattcgcaatggaaagatgagacgttatttaaattacaacgtcagtttgcatacacgaaagaagagattcataagtatattcaggaacttgtagaaggtaagaaggatcctatcggtgcaatgggatatgatgcgccaattgcagtgttgaacgagcgaccagaatcactatttaattactttaaacagctgtttgcacaagttacgaatccaccaattgatgcgtatcgtgaaaaaatcgtaacgagtgaactttcttatttaggtggcgaaggtaacttactagcacctgacgaaacggttttagatcgtattcaattgaaaaggccggtattgaatgaatcacacttagcagcgattgatcaggaacattttaaattaacttatttatcaacggtatatgaaggggatttggaagatgcgttagaagcattaggccgagaagcagtgaatgctgtaaagcaaggcgctcaaattctagtgttagatgatagtggattagttgatagcaatggctttgcaatgccgatgttactcgcaataagtcatgtgcatcaattacttattaaagcagatttacgtatgtctacaagtttagtcgctaaatctggtgagacacgagaagtgcatcatgttgcttgtttactcgcatatggcgcgaatgcaattgtgccatacctagcgcaacgtacagttgaacaactgacattgacagaagggttacaaggcaccgttgtcgataatgttaagacatatacggatgtattgtcagaaggtgtcattaaagtaatggctaagatgggaatttcgacagtgcaaagttatcaaggggcacaaatatttgaagcgattggcttgtctcatgatgtgattgatcgttattttactgggacacagtctaagttatctggtatttcgattgatcaaattgatgctgaaaataaagcacgtcaacaaagtgatgataattatcttgcatcaggtagtacattccaatggagacaacaaggtcaacatcatgcttttaatccggaatctattttcttattgcagcacgcatgtaaagaaaatgactatgcgcaatttaaagcatactctgaagcggtgaacaaaaatagaacagatcacattagacatttacttgaatttaaagcatgtacaccgattgacatcgaccaagttgaaccggtaagtgacattgtcaaacgctttaatacaggggcgatgagttatggatcgatttcagcggaagcacatgaaacgttagcacaagccatgaaccaattaggtggaaagagtaatagtggtgaaggtggcgaagatgcaaaacgttatgaagtacaagttgatggaagcaacaaagtaagtgcgattaaacaagttgcttctgggcgttttggtgtaactagtgattatttacaacatgccaaagaaattcaaattaaagttgcgcaaggtgcaaagcctggtgaaggtggtcaattacctggtactaaggtatatccgtggattgcgaagacaagagggtcaacgccaggtatcggtctgatttcaccaccgccacatcatgatatttattcaatagaagatttagcgcaactgatacatgatttgaaaaatgcgaataaagatgcagatatcgcggtaaaattagtttcgaaaacaggtgttggtaccattgcatctggggtggcaaaagcatttgcagataaaattgtcatcagtggttacgatggtggtacaggggcttcacccaaaacgagtattcagcatgccggtgttccttgggagattggtttagcagaaacacatcaaacattaaaactaaatgacttaagaagtcgtgttaagttagaaacagacggtaagttattaactggtaaagatgtagcgtacgcatgtgcgcttggagcggaagaatttggatttgcaactgcaccattagtggtgttgggctgtattatgatgcgtgtatgccataaagatacatgtccagtaggagttgcaactcaaaacaaagatttacgtgctttatatagaggtaaagcacatcatgttgttaattttatgcattttattgcacaagaattaagagaaattttagcatctttaggtttgaaacgtgtagaagacttagttggaagaactgatttattacaacgatcatcaacattaaaagcgaatagcaaagcggctagtattgatgttgaaaaactgttatgtcctttcgatgggccaaacacaaaagaaattcaacaaaatcataatcttgagcatggatttgatttaacaaatttatatgaagtaacgaagccatatattgctgaagggcgtcgctatacaggtagctttacagtaaataatgaacaacgtgatgtaggggttattacaggtagtgagatttcgaaacaatatggagaagcaggacttcctgaaaatacaattaatgtttatacgaatggtcatgctggtcaaagtcttgcagcatatgcaccgaaaggcttaatgattcatcatactggagatgcgaatgactatgttggtaaaggattatctggtggtacggtcattgtcaaagcaccttttgaagaacgacaaaatgaaattattgctggtaacgtctcattctatggtgcgacaagtggtaaggcatttattaacggtagtgcaggagaaagattctgtattagaaatagtggtgtagatgttgtcgttgaaggtatcggcgaccatggattagagtatatgactggtggacatgtcattaatttaggtgatgtaggtaagaacttcggtcaaggtatgagtggtggtattgcttacgttatcccgtctgatgtagaagcttttgttgaaaataatcaactagatacgctttcgtttacaaagattaaacaccaagaagaaaaagcattcattaagcaaatgctggaagaacatgtgtcacacacgaatagtacgagagcgattcatgtgttaaaacattttgatcgcattgaagatgtcgtcgttaaagttattcctaaagattatcaattaatgatgcaaaaaattcatttgcacaaatcattacatgacaatgaagatgaagcgatgttagctgcattttacgatgacagtaaaacaatcgatgctaaacataaaccagccgttgtgtattaaggaaagggggagatacgatgggtgaatttaaaggatttatgaagtatgacaaacagtacttaggtgaattatcactggtagaccgtttgaagcatcataaagcatatcaacaacgatttactaaagaagatgcctctatccaaggtgcacgatgtatggattgtggaacgccgttttgtcaaaccggacaacagtatggtagggaaacaataggttgtccaattggaaactacattcctgaatggaacgacttagtgtatcatcaagattttaaaactgcttatgaacgcttaagcgaaacaaataactttcctgactttacagggcgtgtatgtcctgcaccatgcgaaagtgcttgtgtgatgaagattaatagagaatcgattgcgattaaaggtattgaacgcacaattattgatgaagcttttgaaaatggttgggtagcgccgaaagttccgagtcgccgtagagatgaaaaagtggcaatcgttggaagcggtccagcaggattagctgctgctgaagaacttaatctactaggatatcaagtaactatttatgaacgtgctagagaatcaggcggtttattaatgtatggtattccgaatatgaaacttgataaagatgtggttcgacgtcgtattaagttaatggaagaagcgggcattactttcattaatggtgttgaagtcggcgttgatattgataaagcaacgttagaatctgagtatgatgccattatattatgtactggtgcacaaaaaggtagagatttacctttagaaggacgcatgggtgatggtatacatttcgctatggattatttaactgaacaaacgcagttgttaaatggagaaattgatgatataacaataactgcaaaagataagaatgtcattatcattggtgctggtgatacaggggcagactgtgtagcgacagcattaagagaaaattgtaaatcgattgttcaatttaataaatatacgaaattgccagaagcaattacatttacagaaaatgcatcatggcctttagcaatgccggtgtttaaaatggactatgcgcaccaagagtacgaagctaagtttggtaaggaaccacgtgcatatggtgttcaaacaatgcgttacgatgttgacgataaaggacacatacgtggtttgtatactcaaattttagagcaaggcgaaaatggtatggtcatgaaagaaggacctgaaagattttggcctgctgaccttgtattattatcaatcggcttcgaaggtacagaaccaacagtaccgaatgcttttaacattaaaacggatagaaatcgaatcgtggcggatgatacaaactatcaaactaataatgaaaaggtatttgctgctggagatgctagacgtggtcaaagtttagttgtatgggcaattaaagaaggtagaggcgtagcgaaagcagtagatcagtatttagctagtaaagtttgtgtataatctttgtatggaaatggtggttacgttgacgttgtgacatgctgaatcgagtttgaaaaaatctagtatctatcaacgtcacatgccatctttgtaacctaaaaacaaaggtttgtaagacaacaaatagattaattataagtagtgattttttacattcgtttataggtcaactgtagtggaagacaatgatttgtggtaatcatgtaatgcttaaaaacaatattgacttttacagaacgttcatatatgataaatattgtgtttaggaggaatacccaagtccggctgaagggatcggtcttgaaaaccgacaggggcttaacggctcgcgggggttcgaatccctcttcctccgccatcaatatttatattaaattctatatataatgaaggtaagtgctcaaattttgagtatttaccttttttatttgtctttgaatggctcgtaatttttgataatagaaatgataaggcattgagattggaagggcatttggcttgtgcaatatacatagctaaatgtcttttttgttttgtgaaatatgatggatggcttgtgtggacaagtttgctatttatagatatgcatttttcaatttaggagttggccatgcatctacactttataatggtgagagcgtggtgaggtattgttaataacgcaattgtagcgaggagttattgctacatatgtcgttatggctcattgattttctgaaatggctaccccagataattgtgacaaaataaaaatattttgttgaaagcctttacataacttgtctagacaagttatactcgttttaagacattaagggagtgaaatatatggctgtaaaaagagaagatgtaaaagccatcgtaaccgctattgggggaaaagaaaatcttgaagctgcaacgcattgtgtaacacgattacgtttagtgctgaaggatgaaagtaaagttgataaagacgcattaagtaataacgcgttggtcaaggggcagtttaaagcagaccatcaatatcaaattgtcattggtccaggaacagtcgatgaagtgtataagcagtttattgatgaaacaggtgctcaagaagcttcgaaagatgaagcgaaacaagcagctgcacaaaaagggaatccagtacaacgtttgatcaaattgttgggggatatttttataccaatattacctgcgattgtgacagctggtttgttaatgggaatcaataatttacttacaatgaaaggtttatttggtccaaaagcacttattgagatgtatccacaaattgctgatatttcaaacatcattaatgtgattgcgagtacggcatttattttcttaccagcattaattggttggagtagtatgcgtgtatttggtggtagtccgattctaggcatagtcttaggtttgattttaatgcatccgcaattagtatctcagtatgatttggcaaaagggaatattccgacgtggaacttatttggcttagagattaagcagttgaattaccaaggtcaagtgttgccagttttaattgcagcttacgttctagctaaaattgaaaaaggattaaataaagtcgttcacgattcgataaaaatgttggtcgttggacccgtagcgcttttagttactggatttttagcatttattatcattggaccagttgcgttattgattggtacaggtattacatctggtgttacatttatattccaacatgcaggatggcttggcggagcaatatatggattgttatatgcaccacttgtaattacaggactacaccatatgtttttagcagtagatttccaattgatgggtagcagcttaggcggtacgtatttatggccaattgttgcgatttccaatatttgtcagggctctgcagcatttggagcatggtttgtctataaacgtcgtaaaatggttaaagaagaaggcttggcattaacatcttgtatttctggtatgttaggtgttactgaaccagccatgttcggtgtgaacttacctctgaaatatccatttatcgctgcgatatcaacgtcttgtgtattgggggcaatcgttggtatgaataacgtacttggaaaagttggtgttggtggcgtgccagcattcatttcaattcaaaaagaattttggccagtatatcttattgtgacagctattgctattgttgtaccatgtatactaacaattgtgatgtctcattttagtaaacaaaaagcgaaagaaattgttgaagattaataaaataaaaaaggggcgttcgttatttggacgtcctttattacgttataaggtggtaattgtgtgtcgaaagaaatagattggagaaaatccgttgtatatcaaatttatcctaagtcgtttaatgatacgacggggaatggtataggagatatcaatggaattatagaaaaattggattatatcaagttattgggtgttgattatatttggttaacaccagtgtatgaatcaccgatgaatgataatggctatgatatcagcaattatttagaaatcaatgaagactttggaacgatggatgattttgaaaagttaatcaaagttgcgcatcaaaaagacttgaaagtgatgttagatattgtcattaatcatacgtcgacggagcatgaatggtttaaagaagcccgtaaatctaaagataacccttatagagattattactttttcagatcatctgaagacgggccgccaacaaattggtattctaaattcggtggtaatgcatggaagtatgattctgagacagatgaatattatttacatttatttgatgtcagtcaagctgatttaaattgggataatccggaagtacgtcaatcgttatatcgcatagtcaatcattggatagacttcggcgttgatggttttcgatttgatgtcattaacttaatttctaaaggtgaatttaaggactctgacaaaataggtaaagaattttatacggatggtcctagagtgcatgagtttctgcatgaattaaatcgtcaaacgtttggtaacactgacatgatgactataggagaaatgtcttcgacgacgattgaaaattgtattaagtatacacaaccagaacgccaagaattgaatagtgtttttaattttcatcatctaaaggttgattatgttgatggtgaaaagtggacaaatgcgaagcttgattttcataagttaaaggaaattctgatgcaatggcaacgaggtatttatgacggtggcggatggaacgcgattttctggtgtaatcatgatcagccacgggtagtgtctagatttggtgatgatacgtcggaagagatgaggatacaaagtgctaaaatgttagctatcgcactgcatatgttgcaagggacgccatatatttaccaaggtgaagaaattggtatgacggacccacattttacatcaatagcacaatatcgtgatgttgaatcgattaatgcctaccatcagttgttaagtgaagggcatgctgaagcggatgtgttagcgattttaggacagaagtcacgagacaattcgagaacgcctatgcaatggagtgatgatgttaatgctggatttacagctggtaagccttggattgatatttcggaaaattatcatcaggtcaacgttagacaagcacttcagaataaagagtctattttctatacgtatcaaaaattaatacaattaagacatacgcatgatattattacgtatggagacattgtgccacgttttatggatcatgatcatttatttgtttatgaacgtcattataagaatcaacaatggctagtaattgcgaatttctcagcatcggctgttgatttgccagaaggattggctagagaaggttgtgttgtgattcaaacaggcacagtggaaaataatacgataagcgggtttggtgcaattgtaatcgaaacaaacgcgtaaaataaattgagtggatgcgtttatatggcgaaacaaaaaaagtttatgaagatttatgaggcgttgaaagaagatatattaaacgggcagattcaatatggtgaacaaattccgtctgaacatgatttggtgcaattgtaccagtcatctcgagagaccgtgcgtaaggcattagatttgttggcattagacggcatgattcaaaagattcatggtaaagggtcacttgtcatttatcaggaggttacagagtttccattttctgaacttgttagttttaaagaaatgcaagaagaaatgggcgtcgcatatttaactgaagttgttgtgaatgaggttgttgaagcgcatgaagttccagaagttcaacatgctttaaacatcaattctagtgaatcactcattcatattgttagaactcgtcggcttaaccaacatgtgaagattgttgatgaagattattttctaaagtcgattgtttcagatataggtaatgatgttgcgagtgattctatttatgattatttggaaaaggtattaaatcttaatattagttattcaagtaagtctattacttttgaaccgtttgatgaacaagcatatcaattgtttggtgatgtatcggtggcttattcagcaacagttcgaagtattgtgtatttagaaaatacaatgccgtttcaatataatatttcaaaacatcttgcaaatgaatttaaatttaatgacttctcaagacgtcgtataaagtaaacaatgatataaatgatttatacttgcaattaactattaaaatatagtaatatatatcttgccgtgctaggtggggaggtagcggttccctgtactcgaaatccgctttatgcgaggcttaattcctttgttgaggccgtatttttgcgaagtctgcccaaagcacgtagtgtttgaagatttcggtcctatgcaatatgaacccatgaaccatgtcaggtcctgacggaagcagcattaagtggatcatcatatgtgccgtagggtagccgagatttagctaacgactttggttacgttcgtgaattacgttcgatgcttaggtgcacggttttttattttttaaatattaaaccgattattaagagttgaaaatatataattatagaagctactttcttgaagacaattcagcgtattatacgtggaacatgtttgtgggaagtagcttttttatatgtgaagtttgattcaagtgaactcgatgtgcagtttgaatgatttttgtgtcaatgaaaagtaagaagttataatttgatgataaagaaatgatggtgaaatgagggggagtatcttacaatagaattattaatgagatacgttatgattattgacaatcaaatgcctacggaggacatatgcaaatatatttaagtactttaacagagttagattatgataaatctttaaatagtattgaagaaagttttgatgataatcctgaaacgagttggcaagcacgtgcgaaagtaaaacatttaagaaaatctccttgctataattttgaattagaagtaatagcgaaaaatgaaaataacgatgtcgttggacacgttttattaattgaagtagaaattaatagtgatgataagacgtattatggtttggcgattgcctctttatcagttcatcctgaattacgtggacaaaaattaggtcgtggcttggttcaagcagtagaagagcgtgccaaagcacaagagtatagtacggttgttgtagaccattgttttgactactttgaaaagttgggttatcaaaatgctgctgagcatgacattaaattagaatctggtgatgcaccgttacttgtaaaatatttatgggataatttgacggatgcaccacacggaatcgtaaaatttccagaacatttttattaattgttcaattaagaagtaaaggtattatcatgctataatgagaggtaattgtttatggaggtgctaacttgaattatcaagccttatatcgtatgtacagaccccaaagtttcgaggatgtcgtcggacaagaacatgtcacgaagacattgcgcaatgcgatttcgaaagaaaaacagtcgcatgcttatatttttagtggtccgagaggtacggggaaaacgagtattgccaaagtgtttgctaaagcaatcaactgtctaaatagcactgatggagaaccttgtaatgaatgtcatatttgtaaaggcattacgcaggggactaattcagatgtgatagaaattgatgctgctagtaataatggcgttgatgaaataagaaatattagagacaaagttaaatatgcaccaagtgaatcgaaatataaagtttatattatagatgaggtgcacatgctaacaacaggtgcttttaatgcccttttaaagacgttagaagaacctccagcacacgctatttttatattggcaacgacagaaccacataaaatccctccaacaatcatttctagggcacaacgttttgattttaaagcaattagcctagatcaaattgttgaacgtttaaaatttgtagcagatgcacaacaaattgaatgtgaagatgaagccttggcatttatcgctaaagcgtctgaagggggtatgcgtgatgcattaagtattatggatcaggctattgcatttggtgatggtacgttaacattgcaagatgcgttgaatgtcacaggtagcgtacatgatgaagcgttggatcacttgtttgatgatattgtacaaggtgacgtacaagcatcttttaaaaaataccatcagtttataacagaaggtaaagaagtgaatcgcctaataaatgatatgatttattttgtcagagatacgattatgaataaaacatctgagaaagatactgagtatcgagcactgatgaacttagaattagatatgttatatcaaatgattgatcttattaatgatacattagtgtcgattcgttttagtgtgaatcaaaacgttcattttgaagtgttgttagtaaaattagctgagcagattaagggtcaaccacaagtgattgcgaatgtagctgaaccagcacaaattgcttcatcgccaaacacagatgtattgttgcaacgtatggaacagttagagcaagaactaaaaacactaaaagcacaaggagtgagtgtcgctcctgttcaaaaatcttcgaaaaagcctgcgagaggcatacaaaaatctaaaaatgcattttcaatgcaacaaattgcaaaagtgctagataaagcgaataaggcagatatcaaattgttgaaagatcattggcaagaagtgattgatcatgccaaaaataatgataaaaaatcactcgttagtttattgcaaaattcggaacctgtggcggcaagtgaagatcacgtacttgtgaaatttgaggaagagatccattgtgaaatcgtcaataaagacgacgagaaacgtagtagtatagaaagtgttgtatgtaatatcgttaataaaaacgttaaagttgttggtgtaccatcagatcaatggcaaagagttcgaacggaatatttacaaaatcgtaaaaacgaaggcgatgatatgccaaagcaacaagcacaacaaacagatattgctcaaaaagcaaaagatcttttcggtgaagaaactgtacatgtgatagatgaagagtgatacatgacaagcgatataatcgtatgtataatgaaagaaacatcattttattgataaatatttattgattttcaaggaggaaatggaatatgcgcggtggcggaaacatgcaacaaatgatgaaacaaatgcaaaaaatgcaaaagaaaatggctcaagaacaagaaaaacttaaagaagagcgtattgtaggaacagctggcggtggcatggttgcagttactgtaactggtcataaagaagttgtcgacgttgaaatcaaagaagaagctgtagacccagacgatattgaaatgctacaagacttagtgttagcagctactaatgaagcgatgaataaagctgatgagcttactcaagaacgtttaggtaaacatactcaaggcttaaacatccctggaatgtgatcatagatgcattatccagaacctatatcaaaacttattgatagctttatgaaattgccaggcattggtccaaagacagcccaacgtctggcttttcataccttagatatgaaagaagacgatgttgttcagtttgccaaagcattagtagatgttaagagagaattaacatattgtagcgtatgtggtcacattactgaaaatgatccatgttatatttgtgaagataagcaaagagatcgttcagttatttgtgttgtggaagatgacaaagatgtcatagctatggaaaaaatgagagaatacaaaggtttatatcacgttttacatgggtctatttcgcctatggatggcattggaccagaagatattaatattccttcattgattgaacgcttgaaaaacgatgaagttagcgaattaatcttagctatgaacccgaacttagagggggaatctacagccatgtatatttctagattagttaagcctataggtatcaaagtgacgagattagcacaagggttatcggtaggtggcgatttagagtatgctgacgaagtaacattatctaaagcaatcgcaggtagaacagaaatgtaatgtcttctattaaacatttttgattttaatactatagtaagaaaagtcacagtgtaatcattgtggctttttttatggtgtggtgtgatgtactactttatttgcggtgtggcggtggtatggtttacctagttttactgagggatgggtaatctttaggaagcaagccgttggttgtgatttgttacttctaatagtaatgatgtgaattggattatcgaattagatctatggttatggtgtgttggtgctattaatttgataaatgcggttaatgactatgcaaatgaaattcttttgtaattgaaatgatagatgctggcttagtaagttgtacttctttggtctaaagcttattaaatcagcctgtatagcggtgttttgagagattatttaaaacttgtaaatttatttttaatttctggtaaaaaaataacgttctgttttgcgttttttttgattgatatggttagagaaaaatctgtttcttgttctaaaaaacgtactatttataagtggggattttttaagttcgatttttaggataagggcgttcagtacagatgacaaaggtgtaatttttactgttgttaagcagtttgaaagcctgtatagtatttatttgttgaggcaaacaaaacaactcaacttaagaaataacttgaattactaacgaaaattaattttaaaaagttattgacttaaatgttaataaaatgtataattaattcttgtcggtaagnnnnnnnnnnnnnnnnnnnnnnnnnnnnnnnnnnnnnnnnnnnnnnnnnnnnnnnnnnnnnnnnnnnnnnnnnnnnnnnnnnnnnnnnnnnnnnnnnnnnnnnnnnnnnnnnnnnnnnnnnnnnnnnnnnnnnnnnnnnnnnnnnnnnnnnnnnnnnnnnnnnnnnnnnnnnnnnnnnnnnnnnnnnnnnnnnnnnnnnnnnnnnnnnnnnnnnnnnnnnnnnnnnnnnnnnnnnnnnnnnnnnnnnnnnnnnnnnnnnnnnnnnnnnnnnnnnnnnnnnnnnnnnnnnnnnnnnnnnnnnnnnnnnnnnnnnnnnnnnnnnnnnnnnnnnnnnnnnnnnnnnnnnnnnnnnnnnnnnnnnnnnnnnnnnnnnnnnnnnnnnnnnnnnnnnnnnnnnnnnnnnnnnnnnnnnnnnnnnnnnnnnnnnnnnnnnnnnnnnnnnnnnnnnnnnnnnnnnnnnnnnnnnnnnnnnnnnnnnnnnnnnnnnnnnnnnnnnnnnnnnnnnnnnnnnnnnnnnnnnnnnnnnnnnnnnnnnnnnnnnnnnnnnnnnnnnnnnnnnnnnnnnnnnnnnnnnnnnnnnnnnnnnnnnnnnnnnnnnnnnnnnnnnnnnnnnnnnnnnnnnnnnnnnnnnnnnnnnnnnnnnnnnnnnnnnnnnnnnnnnnnnnnnnnnnnnnnnnnnnnnnnnnnnnnnnnnnnnnnnnnnnnnnnnnnnnnnnnnnnnnnnnnnnnnnnnnnnnnnnnnnnnnnnnnnnnnnnnnnnnnnnnnnnnnnnnnnnnnnnnnnnnnnnnnnnnnnnnnnnnnnnnnnnnnnnnnnnnnnnnnnnnnnnnnnnnnnnnnnnnnnnnnnnnnnnnnnnnnnnnnnnnnnnnnnnnnnnnnnnnnnnnnnnnnnnnnnnnnnnnnnnnnnnnnnnnnnnnnnnnnnnnnnnnnnnnnnnnnnnnnnnnnnnnnnnnnnnnnnnnnnnnnnnnnnnnnnnnnnnnnnnnnnnnnnnnnnnnnnnnnnnnnnnnnnnnnnnnnnnnnnnnnnnnnnnnnnnnnnnnnnnnnnnnnnnnnnnnnnnnnnnnnnnnnnnnnnnnnnnnnnnnnnnnnnnnnnnnnnnnnnnnnnnnnnnnnnnnnnnnnnnnnnnnnnnnnnnnnnnnnnnnnnnnnnnnnnnnnnnnnnnnnnnnnnnnnnnnnnnnnnnnnnnnnnnnnnnnnnnnnnnnnnnnnnnnnnnnnnnnnnnnnnnnnnnnnnnnnnnnnnnnnnnnnnnnnnnnnnnnnnnnnnnnnnnnnnnnnnnnnnnnnnnnnnnnnnnnnnnnnnnnnnnnnnnnnnnnnnnnnnnnnnnnnnnnnnnnnnnnnnnnnnnnnnnnnnnnnnnnnnnnnnnnnnnnnnnnnnnnnnnnnnnnnnnnnnnnnnnnnnnnnnnnnnnnnnnnnnnnnnnnnnnnnnnnnnnnnnnnnnnnnnnnnnnnnnnnnnnnnnnnnnnnnnnnnnnnnnnnnnnnnnnnnnnnnnnnnnnnnnnnnnnnnnnnnnnnnnnnnnnnnnnnnnnnnnnnnnnnnnnnnnnnnnnnnnnnnnnnnnnnnnnnnnnnnnnnnnnnnnnnnnnnnnnnnnnnnnnnnnnnnnnnnnnnnnnnnnnnnnnnnnnnnnnnnnnnnnnnnnnnnnnnnnnnnnnnnnnnnnnnnnnnnnnnnnnnnnnnnnnnnnnnnnnnnnnnnnnnnnnnnnnnnnnnnnnnnnnnnnnnnnnnnnnnnnnnnnnnnnnnnnnnnnnnnnnnnnnnnnnnnnnnnnnnnnnnnnnnnnnnnnnnnnnnnnnnnnnnnnnnnnnnnnnnnnnnnnnnnnnnnnnnnnnnnnnnnnnnnnnnnnnnnnnnnnnnnnnnnnnnnnnnnnnnnnnnnnnnnnnnnnnnnnnnnnnnnnnnnnnnnnnnnnnnnnnnnnnnnnnnnnnnnnnnnnnnnnnnnnnnnnnnnnnnnnnnnnnnnnnnnnnnnnnnnnnnnnnnnnnnnnnnnnnnnnnnnnnnnnnnnnnnnnnnnnnnnnnnnnnnnnnnnnnnnnnnnnnnnnnnnnnnnnnnnnnnnnnnnnnnnnnnnnnnnnnnnnnnnnnnnnnnnnnnnnnnnnnnnnnnnnnnnnnnnnnnnnnnnnnnnnnnnnnnnnnnnnnnnnnnnnnnnnnnnnnnnnnnnnnnnnnnnnnnnnnnnnnnnnnnnnnnnnnnnnnnnnnnnnnnnnnnnnnnnnnnnnnnnnnnnnnnnnnnnnnnnnnnnnnnnnnnnnnnnnnnnnnnnnnnnnnnnnnnnnnnnnnnnnnnnnnnnnnnnnnnnnnnnnnnnnnnnnnnnnnnnnnnnnnnnnnnnnnnnnnnnnnnnnnnnnnnnnnnnnnnnnnnnnnnnnnnnnnnnnnnnnnnnnnnnnnnnnnnnnnnnnnnnnnnnnnnnnnnnnnnnnnnnnnnnnnnnnnnnnnnnnnnnnnnnnnnnnnnnnnnnnnnnnnnnnnnnnnnnnnnnnnnnnnnnnnnnnnnnnnnnnnnnnnnnnnnnnnnnnnnnnnnnnnnnnnnnnnnnnnnnnnnnnnnnnnnnnnnnnnnnnnnnnnnnnnnnnnnnnnnnnnnnnnnnnnnnnnnnnnnnnnnnnnnnnnnnnnnnnnnnnnnnnnnnnnnnnnnnnnnnnnnnnnnnnnnnnnnnnnnnnnnnnnnnnnnnnnnnnnnnnnnnnnnnnnnnnnnnnnnnnnnnnnnnnnnnnnnnnnnnnnnnnnnnnnnnnnnnnnnnnnnnnnnnnnnnnnnnnnnnnnnnnnnnnnnnnnnnnnnnnnnnnnnnnnnnnnnnnnnnnnnnnnnnnnnnnnnnnnnnnnnnnnnnnnnnnnnnnnnnnnnnnnnnnnnnnnnnnnnnnnnnnnnnnnnnnnnnnnnnnnnnnnnnnnnnnnnnnnnnnnnnnnnnnnnnnnnnnnnnnnnnnnnnnnnnnnnnnnnnnnnnnnnnnnnnnnnnnnnnnnnnnnnnnnnnnnnnnnnnnnnnnnnnnnnnnnnnnnnnnnnnnnnnnnnnnnnnnnnnnnnnnnnnnnnnnnnnnnnnnnnnnnnnnnnnnnnnnnnnnnnnnnnnnnnnnnnnnnnnnnnnnnnnnnnnnnnnnnnnnnnnnnnnnnnnnnnnnnnnnnnnnnnnnnnnnnnnnnnnnnnnnnnnnnnnnnnnnnnnnnnnnnnnnnnnnnnnnnnnnnnnnnnnnnnnnnnnnnnnnnnnnnnnnnnnnnnnnnnnnnnnnnnnnnnnnnnnnnnnnnnnnnnnnnnnnnnnnnnnnnnnnnnnnnnnnnnnnnnnnnnnnnnnnnnnnnnnnnnnnnnnnnnnnnnnnnnnnnnnnnnnnnnnnnnnnnnnnnnnnnnnnnnnnnnnnnnnnnnnnnnnnnnnnnnnnnnnnnnnnnnnnnnnnnnnnnnnnnnnnnnnnnnnnnnnnnnnnnnnnnnnnnnnnnnnnnnnnnnnnnnnnnnnnnnnnnnnnnnnnnnnnnnnnnnnnnnnnnnnnnnnnnnnnnnnnnnnnnnnnnnnnnnnnnnnnnnnnnnnnnnnnnnnnnnnnnnnnnnnnnnnnnnnnnnnnnnnnnnnnnnnnnnnnnnnnnnnnnnnnnnnnnnnnnnnnnnnnnnnnnnnnnnnnnnnnnnnnnnnnnnnnnnnnnnnnnnnnnnnnnnnnnnnnnnnnnnnnnnnnnnnnnnnnnnnnnnnnnnnnnnnnnnnnnnnnnnnnnnnnnnnnnnnnnnnnnnnnnnnnnnnnnnnnnnnnnnnnnnnnnnnnnnnnnnnnnnnnnnnnnnnnnnnnnnnnnnnnnnnnnnnnnnnnnnnnnnnnnnnnnnnnnnnnnnnnnnnnnnnnnnnnnnnnnnnnnnnnnnnnnnnnnnnnnnnnnnnnnnnnnnnnnnnnnnnnnnnnnnnnnnnnnnnnnnnnnnnnnnnnnnnnnnnnnnnnnnnnnnnnnnnnnnnnnnnnnnnnnnnnnnnnnnnnnnnnnnnnnnnnnnnnnnnnnnnnnnnnnnnnnnnnnnnnnnnnnnnnnnnnnnnnnnnnnnnnnnnnnnnnnnnnnnnnnnnnnnnnnnnnnnnnnnnnnnnnnnnnnnnnnnnnnnnnnnnnnnnnnnnnnnnnnnnnnnnnnnnnnnnnnnnnnnnnnnnnnnnnnnnnnnnnnnnnnnnnnnnnnnnnnnnnnnnnnnnnnnnnnnnnnnnnnnnnnnnnnnnnnnnnnnnnnnnnnnnnnnnnnnnnnnnnnnnnnnnnnnnnnnnnnnnnnnnnnnnnnnnnnnnnnnnnnnnnnnnnnnnnnnnnnnnnnnnnnnnnnnnnnnnnnnnnnnnnnnnnnnnnnnnnnnnnnnnnnnnnnnnnnnnnnnnnnnnnnnnnnnnnnnnnnnnnnnnnnnnnnnnnnnnnnnnnnnnnnnnnnnnnnnnnnnnnnnnnnnnnnnnnnnnnnnnnnnnnnnnnnnnnnnnnnnnnnnnnnnnnnnnnnnnnnnnnnnnnnnnnnnnnnnnnnnnnnnnnnnnnnnnnnnnnnnnnnnnnnnnnnnnnnnnnnnnnnnnnnnnnnnnnnnnnnnnnnnnnnnnnnnnnnnnnnnnnnnnnnnnnnnnnnnnnnnnnnnnnnnnnnnnnnnnnnnnnnnnnnnnnnnnnnnnnnnnnnnnnnnnnnnnnnnnnnnnnnnnnnnnnnnnnnnnnnnnnnnnnnnnnnnnnnnnnnnnnnnnnnnnnnnnnnnnnnnnnnnnnnnnnnnnnnnnnnnnnnnnnnnnnnnnnnnnnnnnnnnnnnnnnnnnnnnnnnnnnnnnnnnnnnnnnnnnnnnnnnnnnnnnnnnnnnnnnnnnnnnnnnnnnnnnnnnnnnnnnnnnnnnnnnnnnnnnnnnnnnnnnnnnnnnnnnnnnnnnnnnnnnnnnnnnnnnnnnnnnnnnnnnnnnnnnnnnnnnnnnnnnnnnnnnnnnnnnnnnnnnnnnnnnnnnnnnnnnnnnnnnnnnnnnnnnnnnnnnnnnnnnnnnnnnnnnnnnnnnnnnnnnnnnnnnnnnnnnnnnnnnnnnnnnnnnnnnnnnnnnnnnnnnnnnnnnnnnnnnnnnnnnnnnnnnnnnnnnnnnnnnnnnnnnnnnnnnnnnnnnnnnnnnnnnnnnnnnnnnnnnnnnnnnnnnnnnnnnnnnnnnnnnnnnnnnnnnnnnnnnnnnnnnnnnnnnnnnnnnnnnnnnnnnnnnnnnnnnnnnnnnnnnnnnnnnnnnnnnnnnnnnnnnnnnnnnnnnnnnnnnnnnnnnnnnnnnnnnnnnnnnnnnnnnnnnnnnnnnnnnnnnnnnnnnnnnnnnnnnnnnnnnnnnnnnnnnnnnnnnnnnnnnnnnnnnnnnnnnnnnnnnnnnnnnnnnnnnnnnnnnnnnnnnnnnnnnnnnnnnnnnnnnnnnnnnnnnnnnnnnnnnnnnnnnnnnnnnnnnnnnnnnnnnnnnnnnnnnnnnnnnnnnnnnnnnnnaagttgagaccgtgaggtctctttttttatgtctaaaacgtcaaaataaaaagtaaacacaaagaaaaatggcttggcgaagtgaaaacgtttgaatctgacgaaacgagaaaagagcgcaacgagtttagtagagctaaatgagtaagcgagagccgaaggagaggaaagaagcaagcgattgtcacaagtcaagaaaggttcttagcgaggatggtagctaacttacgttccgctagagtagaacgttgctagacaagaaatgaatgcgatgagccgcattgagtgtgaaattgatattttaataatgtgcacttttgattatttaaatctgtgactagaagtataagtgaagacattcagaagtattataaaaagtgaacagcagtaagatagtttttaatcataaatcatcttactgctgtttttagattttatgtctaatatcttttaaatcgaagtacaaaaaggaaattaattattatacaatagacaagctattgcataagtaacactaacttttgtcaaagaagtgttactatataattaatacttttgaaagtaactaattccaaaacagtgtaaataaaggaagcgtatatcatgaagcaacctattttaaataaattagaaagtttaaatcaagaagaagcgatttctttgcatgttccgggtcataaaaatatgactatcggtcatttatctcaattatcaatgacaatggataaaactgaaatacctggattagatgatttacatcatcctgaagaagtcattttggaaagtatgaagcaggtggagaaacattcagattatgatgcttatttcttagtgaatggcaccacttcaggaatattatctgtcatccagtctttttcacagaaaaaaggcgatatcttaatggcaagaaatgtacataaatctgtgttacatgcgctcgatattagccaacaagaagggcattttattgaaacgcatcaaagtccgttaacgaatcattataataaagttaatttaagccgtttgaataatgacggtcacaaacttgctgtgttgacttatcctaactattacggtgaaacatttaatgtagaagaggttatcaaatctttgcaccaattaaatattcctgtactcattgacgaagcacacggcgcgcactttggattgcaaggatttccagattctacattaaattatcaagctgactatgttgttcaatcttttcataaaacgttaccagctttaacgatgggctcggtactttatattcataaaaatgcaccttatagagaaactattatagaatatctaagctacttccaaacatctagtccttcgtatttgattatggctagtttagagtcagctgccgagttctataaaacatatgatagtaccgtgttttttgataagagagcgcaattaatcgaatgtttggagaagaagggttttgaaatgcttcaagttgatgatccgttgaagttgctgataaaatatgaaggttttacaggtcatgatattcaaaattggtttatgaatgcacatatctatttagaattagcggacgactatcaagcattagcgatattgccgttatggcatcatgatgatacgtatttatttgattcgcttttacgtaaaattgaagatatgattttaccgaaaaaatcagtttctaaagttaaacaaacacaacttttaacaactgaaggtaactataaaccaaaacgctttgaatatgttacttggtgtgatttgaaaaaggcaaaaggtaaagttctggcgcgacatattgtcccgtatccgccagggattcctattattttcaaaggagaaacaataactgaaaatatgatagaattggtaaatgaatatctggaaactggaatgatagttgaaggaattaaaaataataaaattttagttgaggatgaataaaatgtcagcttttataacttttgagggcccagaaggctctggaaaaacaactgtaattaatgaagtttaccatagattagtaaaagattatgatgtcattatgactagagaaccaggtggtgttcctactggtgaagaaatacgtaaaattgtattagaaggcaatgatatggacattagaactgaagcaatgttatttgctgcatctagaagagaacatcttgtattaaaggtcataccagctttaaaagaaggtaaggttgtgttgtgtgatcgctatatcgatagttcattagcttatcaaggttatgctagagggattggcgttgaagaagtaagagcattaaacgaatttgcaataaatggattatatccagacttgacgatttatttaaatgttagtgctgaagtaggtcgcgaacgtattattaaaaattcaagagatcaaaatagattagatcaagaagatttaaagtttcacgaaaaagtaattgaaggttaccaagaaatcattcataatgaatcacaacggttcaaaagcgttaatgcagatcaacctcttgaaaatgttgttgaagacacgtatcaaactatcatcaaatatttagaaaagatatgatataattgttagaagaggtgttataaaatgaaaatgattatagcgatcgtacaagatcaagatagtcaggaacttgcagatcaacttgttaaaaataactttagagcaacaaaattggcaacaacaggtgggtttttaagagcgggtaatacaacattcttatgtggtgtcaatgatgaccgtgtagatgaaatattgtctgtgattaatcaaacgtgtggtaatagagaacagttggtttcacctattacacctatgggaggcagtgcggattcgtacattccatatccagttgaagttgaagttggcggtgctactgtatttgttatgccagttgatgcattccatcaattttaattctataatacaatcatcaattagagatacttaaaatagtgtattaataagttattaacaattttgggttgcttgactgcgactagttcagatgccaatagatttgatttttgtggttctaaaaataatcacaaatcatggtcgctattgttgcagtaattagttgctctttggcaacctttttatataaaagcaaaagggagtttgtaatgaatggatgaacagcaacaattgacgaatgcatatcattcaaataaattatcgcatgcctatttatttgaaggtgatgatgcacaaacgatgaaacaagttgcgattaattttgcaaagcttattttatgtcaaacagatagtcaatgtgaaacaaaggttagtacatataatcatccagactttatgtatatatcaacaactgagaatgcaattaagaaagaacaagttgaacaacttgtgcgtcatatgaatcaacttcctatagaaagcacaaataaagtgtacatcattgaagactttgaaaagttaactgttcaaggggaaaacagtatcttgaaatttcttgaagaaccaccggacaatacgattgctattttattgtctacaaaacctgagcaaattttagacacaatccattcaaggtgtcagcatgtatatttcaagcctattgataaagaaaagtttataaatagattagttgaacaaaacatgtctaagccagtagctgaaatgattagtacttatactacgcaaatagataatgcaatggctttaaatgaagaatttgatttattagcattaaggaaatcagttatacgttggtgtgaattgttgcttactaataagccaatggcacttataggtattattgatttattgaaacaggctaaaaataaaaaactgcaatctttaactattgcagctgtgaatggtttcttcgaagatatcatacatacaaaggtaaatgtagaggataaacaaatatatagtgatttaaaaaatgatattgatcaatatgcgcaaaagttgtcgtttaatcaattaattttgatgtttgatcaactgacggaagcacataagaaattgaatcaaaatgtaaatccaacgcttgtatttgaacaaatcgtaattaagggtgtgagttagatgccaaatgtaataggtgttcagtttcaaaaagcgggaaaattagaatattatacacctaatgatatacaagtagatatagaagactgggtagttgtcgaatctaaaagaggcatagagataggtattgttaaaaatccattaatggatattgctgaagaggatgttgtgttacctcttaaaaatattattcgcattgctgatgacaaagatattgataaatttaattgtaatgaacgagatgctgaaaatgcattaatactatgtaaagacattgtaagagaacaaggtttggacatgcgtttagtcaattgcgaatatacattagataaatcgaaagttatttttaattttacggcggatgatcgtattgattttagaaaattagtaaaaatattagcgcaacatttaaaaacacgtatcgagttgagacaaattggtgtaagggatgaagccaaattgcttggcggtatcggaccttgtggtaggtcgttatgttgttctacatttttaggggattttgaaccagtatcgattaagatggctaaggatcaaaatttatcattaaatccaactaaaatttctggtgcatgtggtcgtttgatgtgttgtttaaaatatgaaaatgactattatgaggaagtacgtgcacaattacctgatattggtgaagcaattgaaacgcctgatggtaacgggaaagtagttgctttaaatatattagacatttctatgcaggtgaagcttgagggacatgaacagccacttgaatataaattagaagaaatagaaactatgcattaaggaggcattattacatttggatcgcaatgaaatatttgaaaaaataatgcgtttagaaatgaatgtcaatcaactttcaaaggaaacttcagaattaaaggcacttgcagttgaattagtagaagaaaatgtagcgcttcaacttgaaaatgataatttgaaaaaggtgttgggcaatgatgaaccaactactattgatactgcgaattcaaaaccagcaaaagctgtgaaaaagccattaccaagtaaagataatttggctatattgtatggagaaggatttcatatttgtaaaggcgaattatttggaaaacatcgacatggtgaagattgtctgttctgtttagaagttttaagtgattaatcaagcacactcaaatagtgttataattataaatgaatatggtttggataagtctgagacaatgcatgtttcaggctttaattgtgtataaagttttggtgattgcataagagatggcggtactaaatgttattattaagtgtgcacgcagtatcattagttataaaatgtagctgttaaaagtcaaaaatacatcgaatgtagttaggcatataatataaaaagagttttcaattactcaatagaaaaaggttgtcttcataggagttaaaaatgttaaaagagaatgaacgatttgatcaactaatcaaagaagattttagtattattcaaaatgatgatgttttttcattttcaacggatgctttgttgttagggcattttacaaaacctagaacaaaagatattgtgttggacttatgttcaggcaatggggtgatacccttgttattgtttgcgaaacatccacgacatatagaaggtgttgagattcaaaaaacacttgtcgatatggcgcgacgcacatttcaattcaatgatgttgatgaatatttaacaatgcatcacatggatttgaaaaacgttactaaagtatttaaaccttcacaatatactttagtaacgtgtaatccgccttattttaaagagaatcagcaacaccaacatcaaaaagaagtacataagatagcgagacatgagattatgtgtacacttgaagattgcatgattgcagcccgtcatttattaaaagaaggtggcaggctaaacatggtacatcgtgcagagagactaatggatgtcttgtttgaaatgagaaaagtgaatattgaacctaagaaagtcgtttttatatatagtaaagtagggaaatcagcacaaacgatagtagtagaaggtcgaaaaggtggaaatcaaggtttagaaatcatgcccccattttatatttataatgaagatggtaattatagcgaagaaatgaaggaagtatattatggatagtcattttgtatatattgtaaaatgtagtgatggaagtttatatacaggatacgctaaagacgttaatgcacgtgttgaaaaacataaccgaggtcaaggagccaaatatacgaaagtaagacgtccggtgcatttagtttatcaagaaatgtatgagacaaagtctgaagcattgaagcgtgaatatgaaattaaaacttataccagacaaaagaaattgcgattaattaaggagcgatagtatggctgtattatatttagtgggcacaccaattggtaatttagcagatattacttatagagcagttgatgtattgaaacgtgttgatatgattgcttgtgaagacactagagtaactagtaaactgtgtaatcattatgatattccaactccattaaagtcatatcacgaacataacaaggataagcagactgcttttatcattgaacagttagaattaggtcttgacgttgcgctcgtatctgatgctggattgcccttaattagtgatcctggatacgaattagtagtggcagccagagaagctaatattaaagtagagactgtgcctggacctaatgctgggctgacggctttgatggctagtggattaccttcatatgtatatacatttttaggatttttgccacgaaaagagaaagaaaaaagtgctgtattagagcaacgtatgcatgaaaatagcacattaattatatacgaatcaccgcatcgtgtgacagatacattaaaaacaattgcaaagatagatgcaacacgacaagtatcactagggcgtgaattaactaagaagttcgaacaaattgtaactgatgatgtaacacaattacaagcattgattcagcaaggcgatgtaccattgaaaggcgaattcgttatcttaattgaaggtgctaaagcgaacaatgagatatcgtggtttgatgatttatctatcaatgagcatgttgatcattatattcaaacttcacagatgaaaccaaaacaagctattaaaaaagttgctgaagaacgacaacttaaaacgaatgaagtatataatatttatcatcaaataagttaatcactttatcgattatatgaaattttaaacgattttataaacgcaagctgtaattttaaatggtaagttatcattttgcattgatactgataaaatgatgttgactatgataaaaaaatgatgacatcgacgttttttaatgtaaaataaatacattgaaagtaataaataccttaacattgaataagatgaaaatgagatgacgagataaatgttcgcgtccgttgaaatgcatagaaatcttagatattatttgaagtgagacattacgaggaggaacagttatggctaaagaaacattttatataacaaccccaatatactatcctagtgggaatttacatataggacatgcatattctacagtggctggagatgttattgcaagatataagagaatgcaaggatatgatgttcgctatttgactggaacggatgaacacggtcaaaaaattcaagaaaaagctcaaaaagctggtaagacagaaattgaatatttggatgagatgattgctggaattaaacaattgtgggctaagcttgaaatttcaaatgatgattttatcagaacaactgaagaacgtcataaacatgtcgttgagcaagtgtttgaacgtttattaaagcaaggtgatatctatttaggtgaatatgaaggttggtattctgttccggatgaaacatactatacagagtcacaattagtagacccacaatacgaaaacggtaaaattattggtggcaaaagtccagattctggacacgaagttgaactagttaaagaagaaagttatttctttaatattagtaaatatacagaccgtttattagagttctatgaccaaaatccagattttatacaaccaccatcaagaaaaaatgaaatgattaacaacttcattaaaccaggacttgctgatttagctgtttctcgtacatcatttaactggggtgtccatgttccgtctaatccaaaacatgttgtttatgtttggattgatgcgttagttaactatatttcagcattaggctatttatcagatgatgagtcactatttaacaaatactggccagcagatattcatttaatggctaaggaaattgtgcgattccactcaattatttggcctattttattgatggcattagacttaccgttacctaaaaaagtctttgcacatggttggattttgatgaaagatggaaaaatgagtaaatctaaaggtaatgtcgtagaccctaatattttaattgatcgctatggtttagatgctacacgttattatctaatgcgtgaattaccatttggttcagatggcgtatttacacctgaagcatttgttgagcgtacaaatttcgatctagcaaatgacttaggtaacttagtaaaccgtacgatttctatggttaataagtactttgatggcgaattaccagcgtatcaaggtccacttcatgaattagatgaagaaatggaagctatggctttagaaacagtgaaaagctacactgaaagcatggaaagtttgcaattttctgtggcattatctacggtatggaagtttattagtagaacgaataagtatattgacgaaacaacgccttgggtattagctaaggacgatagccaaaaagatatgttaggcaatgtaatggctcacttagttgaaaatattcgttatgcagctgtattattacgtccattcttaacacatgcgccgaaagagatttttgaacaattgaacattaacaatcctcaatttatggaatttagtagtttagagcaatatggtgtgcttaatgagtcaattatggttactgggcaacctaaacctattttcccaagattggatagcgaagcggaaattgcatatatcaaagaatcaatgcaaccgcctgctactaaagaggaaaaagaagagattcctagcaaacctcaaattgatattaaagactttgataaagttgaaattaaggcagcaacgattattgatgctgaacatgttaagaagtcagataagcttttaaaaattcaagtagacttagattctgaacaaagacaaattgtatcaggaattgccaaattctatacaccagatgatattattggtaaaaaagtagcagttgttactaacctgaaaccagctaaattaatgggacaaaaatctgaaggtatgatattatctgctgaaaaagatggtgtattaaccttagtaagtttaccaagtgcaattccaaatggtgcagtgattaaataactgtatttttaaaaattaggagagataattatgttaatcgatacacatgtccatttaaatgatgagcaatacgatgatgatttgagtgaagtgattacacgtgctagagaagcaggtgttgatcgtatgtttgtagttggttttaacaaatcgacaattgaacgcgcgatgaaattaatcgatgagtatgattttttatatggcattatcggttggcatccagttgacgcaattgattttacagaagaacacttggaatggattgaatctttagctcagcatccaaaagtgattggtattggtgaaatgggattagattatcactgggataaatctcctgcagatgttcaaaaggaagtttttagaaagcaaattgctttagctaagcgtttgaagttaccaattatcattcataaccgtgaagcaactcaagactgtatcgatatcttattggaggagcatgctgaagaggtaggcgggattatgcatagctttagtggttctccagaaattgcagatattgtaactaataagctgaatttttatatttcattaggtggacctgtgacatttaaaaatgctaaacagcctaaagaagttgctaagcatgtgtcaatggagcgtttgctagttgaaaccgatgcaccgtatctttcgccacatccgtatagagggaagcgaaatgaaccggcgagagtaactttagtagctgaacaaattgctgaattaaaaggcttatcttatgaagaagtgtgcgaacaaacaactaaaaatgcagagaaattgtttaatttaaattcataaagttaaaagtgagaaagatcaccgccataaatgtaaacgatgctatattcgtttaatatgctatggttctttctcacttttttaaattaaaatatcgtgcatgtggaatacgtgcgatagagatggttagagctttgaaattaagaattgtaggaaggcgttttaaatgaaaatcaatgagtttatagttgtagaaggacgagatgatactgagcgtgttaaacgagctgttgaatgtgatacgattgaaacgaatggtagtgccatcaacgaacaaactttagaagtaattagaaatgctcaacaaagtcgaggcgttattgtattaacagatccagatttcccaggagataaaattagaagtacaattactgaacatgtcaaaggtgttaaacatgcgtatattgatagagaaaaagctaaaaataaaaaagggaaaattggtgttgaacatgccgacttaattgatattaaagaagcgttaatgcatgttagttcaccctttgatgaagcttatgaatcaattgataaatctgtgctaatagagttggggttaattgttgggaaagatgcaaggcgccgtagagaaattttaagtagaaaattgcgaatcggccattccaatggtaagcagttattgaaaaagttaaatgcatttggttataccgaagcggatgtaaggcaagctttagaagatgaatgaggaagtgaaaatgttggataataaagatattgcaacaccatcaagaacgcgagcgttgttagataaatatggctttaattttaaaaaaagtttaggacagaactttttgatagatgtgaatatcattaataatatcattgatgcaagtgatattgatgcacaaactggggtgattgaaattggtccaggcatggggtcattgacagaacaattggccagacatgctaaaagagtattggcatttgaaattgatcaacgtttaatacctgtattaaatgatacactatcaccttatgataatgtgacggtgattaatgaagatattttaaaagcgaatattaaagaagctgttgaaaatcatttacaagattgtgaaaaaataatggttgttgcaaacctgccgtactatattacgacgccaattttattaaatttgatgcaacaagatataccaattgatggctacgtggtgatgatgcaaaaagaagtgggcgaacgcttaaatgctgaagtaggttcaaaagcatatggttcgttatcaattgtcgtacaatactatacagagactagtaaagtattaacggtacctaaatctgtatttatgccaccacctaatgttgattcaatagttgtaaaactgatgcagagaactgaaccgttagtaacagtagataacgaggaagcattctttaagttagcaaaagcagcatttgcacaaagaagaaagacaattaacaataactatcaaaattattttaaagatggtaaacaacacaaagaagtgattttacaatggttggaacaagcaggtattgatccaagacgtcgcggtgaaacgctatctattcaagattttgctaaattgtatgaagaaaagaaaaaattccctcaattagaaaattaaatgattgacaaagcaaagcactattgttaaaatttaaattttgtttgacgaaaacgttgcaaatatggtattatgtaacttgtagcgaggtggagcaatatgccaaaatcaattttggacatcaaaaattctattgattgtcatgtaggaaatcgtattgtactgaaagccaatggaggccgtaagaaaacaataaaacgttctggaattttaaaagaaacatatccgtcagttttcattgttgagttagatcaagacaaacacaactttgagagagtatcttatacatacactgatgtgttaactgaaaatgttcaagtttcatttgaagaggataatcatcacgaatcaattgcacactaaataagacatatagagatgttagacgtttcttagtataagaagtaaatattatgataattatttgagtgttgggcattatgttcaatactctttttatttacaaaatgtttaacactgatgtttcgcttatagatttttcagtaaatggataattgtatttataaacacaaatacaagtaaatactaagtaattagatggagaaaattacttttttattaaaaaaacactaaaaaacaaattaaaatgtcaaatattaattctctttatgttaaaatcatcatattaagataacgaaaagagggcggaaaatgatatatgaaacggcaccagccaaaattaattttacgctcgatacactttttaaaagaaatgatggctatcatgagattgaaatgataatgacaacagttgatttaaatgatcgtttaacttttcataaaagaaaagatcgaaagatagttgttgagattgaacataattatgtgccttctaatcataaaaatctcgcatatcgtgcagcgcaactatttattgagcaatatcaactaaagcaaggtgtaacaatttctatcgataaagaaatacctgtttctgctggcttagctggaggttcggctgatgcagcagcaacgttaagaggattgaatcgactttttgatataggggcgagtttggaagaattggctctactaggcagtaaaatcgggacagatattccgttttgtatttataataaaactgcactatgtactggaagaggagagaaaatcgagtttttaaataaaccaccttcagcttgggtgattcttgctaaaccaaacttaggcatatcatcaccagatatatttaagttgattaatttagataagcgttacgacgtacatacgaaaatgtgttatgaggccttagaaaatcgagattatcaacaattatgtcaaagtttgtctaatcgattagagccaatttctgtttcaaaacacccacaaatcgataaattaaaaaataatatgttgaaaagtggtgcagatggtgcgttaatgagtggaagcggacctactgtgtatgggctagcacgaaaagaaagccaagcaaaaaatatttataatgcagttaacggttgttgtaatgaagtgtacttagttagactattaggatagaagggttgaaaagatgagatataaacgaagcgagagaattgtttttatgacgcaatatttgatgaaccatccgaataaattgattccattaactttttttgtgaaaaaatttaaacaggcgaagtcttcaataagtgaagatgtccaaattataaaaaatacattccaaaaagaaaagttaggtacagtaattactactgctggcgcaagtggtggtgttacgtataaaccaatgatgagtaaagaagaggcgactgaagttgttaatgaggtcattactctattagaagagaaagaacgtttgttacctggcggatatttatttttatcagatttggtaggtaatccatcgctactaaacaaagttggtaagttaattgccagtatttacatggaagaaaaattagatgctgttgttaccattgcgacaaaaggtatttcattggcaaatgcggttgctaatattttaaatttaccagtagtagtgattagaaaagacaacaaggtgactgaaggttctacagtttcaattaattacgtttcaggatcttcaagaaaaatagaaacaatggtactttcgaagagaactttagcagaaaattcaaatgttttagttgtcgatgattttatgagggctggtggctctattaatggtgttatgaatttaatgaatgagtttaaagcccatgtaaaaggggtatcagtacttgtagaatcaaaagaagttaaacaaagattgattgaagattatacttccttagtgaaattatctgatgtagatgaatataatcaagagtttaacgtagaacctggcaacagtttatctaagttttcataaaaggagttttagtattatgaaaatcattaacacaacaagattaccggaagcacttggaccatattcgcatgcaacagttgtgaatggtatggtttatacttctggtcagattccattgaatattgatggacatatcgtaagcgctgatgttcaagcacagacaaaacaagttttagaaaatttaaaggttgttttggaagaagcaggatctgatttgaattctgttgcgaaagcgaccattttcattaaagatatgaatgatttccaaaaaataaatgaagtgtatggtcaatattttaatgaacacaagccagcgcgtagttgtgtagaggttgcgcgtttgccaaaagatgtgaaagtagaaattgaattagtaagtaaaattaaggaattataattttcgattaatatgtttaatcaagcttctaaataaaacagagagatatatactataggggggctcactacatgaaagtgacagatgtaagacttagaaaaatacaaacagatggacgaatgaaagcactcgtttccattacattagatgaagctttcgtaattcatgatttacgtgtaattgaaggaaactctggcttgttcgttgcaatgccaagtaaacgtacaccagatggtgaattccgcgacatcgcgcatcctattaattcagatatgagacaagaaattcaagatgcagtgatgaaagtatatgatgaaacagatgaagtagtaccagataaaaacgctacatcagaagattcagaagaagcttaatcaattttatatttagcgatgtaatacatttgcaataagttgatttgatactgtcgataaagcataaagctttgtcggcagtttttttagtttgtattaatgtttttttatttttaatgaaaggctaataaatatatacgttaacagattatgatgatatgaaaattattgattcattgctgataaaaattgcgtttgaatgatgctcgtatttttgaagtaagaaaaaagttgtttttaaaattacaacgaattaaaaacaatgccttttatatgttgaaagagtattgcagattaaattataataatgacgaagtgtaaaatttaatgggggttaatgttcatgcgaagacacgcgataattttggcagcaggtaaaggcacaagaatgaaatctaaaaagtataaagtgctacacgaggttgctgggaaacctatggtcgaacatgtattggaaagtgtgaaaggctctggtgtcgatcaagttgtaaccatcgtaggacatggtgctgaaagtgtaaaaggacatttaggcgagcgttctttatacagttttcaagaggaacaactcggtactgcgcatgcagtgcaaatggcgaaatcacacttagaagacaaggaaggtacgacaatcgttgtatgtggtgacacaccgctcatcacaaaggaaacattagaaacattgattgcgcatcacgaggatgctaatgctcaagcaactgtattatctgcatcgattcaacaaccatatggatacggaagaatcgttcgaaatgcgtcaggtcgtttagaacgcatagttgaagagaaagatgcaacgcaagctgaaaaggatattaatgaaattagttcaggtatttttgcgtttaataataaaacgttgtttgaaaaattaacacaagtgaaaaatgataatgcgcaaggtgaatattacctccctgatgtattgtcgttaattttaaatgatggcggcatcgtagaagtctatcgtaccaatgatgttgaagaaatcatgggtgtaaatgatcgtgtaatgcttagtcaggctgagaaggcgatgcaacgtcgtacgaatcattatcacatgctaaatggtgtgacaatcatcgatcctgacagcacttatattggtccagacgttacaattggtagtgatacagtcattgaaccaggcgtacgaattaatggtcgtacagaaattggcgaagatgttgttattggtcagtactctgaaattaacaatagtacgattgaaaatggtgcatgtattcaacagtctgttgttaatgatgctagcgtaggagcgaatactaaggtcggaccgtttgcgcaattgagaccaggcgcgcaattaggtgcagatgttaaggttggaaattttgtagaaattaaaaaagcagatcttaaagatggtgccaaggtttcacatttaagttatattggcgatgctgtaattggcgaacgtactaatattggttgcggaacgattacagttaactatgatggtgaaaataaatttaaaactatcgtcggcaaagattcatttgtaggttgcaatgttaatttagtagcacctgtaacaattggtgatgatgtattggtggcagctggttccacaatcacagatgacgtaccaaatgacagtttagctgtggcaagagcaagacaaacaacaaaagaaggatataggaaataatcatttacgtatttaaaatggctaggataaaaggataatcctatgtaatattaatgtaatctttatgatttaatgattcgcatagtaatggagttacattttatatataatagtaattgcgtaagtaaataattggaggactataaatgttaaataatgaatataagaattcgtcattaaagattttttcattgaaaggaaacgaagcattagcgcaagaagttgctgaccaagtaggaattgaactaggtaaatgttcagttaaacgttttagtgatggagaaattcaaattaatatcgaagagagtattcgtggttgtgacgtatttattattcaaccaacatcatatcctgtgaatctacatttaatggaattattaattatgattgatgcttgtaaacgtgcttctgcagcaacaatcaatattgtagtgccatattatggatatgcaagacaagatagaaaagcccgtagccgtgagccaatcactgctaaattagttgcaaacttaatcgaaacagctggcgcaactcgtatgattgcgttagacttacatgcaccacaaattcaaggattctttgatattccaattgaccacttaatgggtgtgccaattcttgctaaacatttcaaagatgatccgaatattaacccagaagaatgtgtcgttgtttcaccagaccatggcggcgttacacgtgcacgtaaattagctgacattttaaaaactccaattgcaattatagataaacgtcgtcctagaccaaatgttgctgaagtgatgaacattgttggtgagattgaaggacgtacggcaattattattgacgatattattgatacagcaggtacaatcactttagctgcacaagcattaaaagataaaggtgctaaagaagtatatgcttgttgtacacaccctgttttatcaggaccggctaaagaacgtatcgaaaattctgctataaaagaattaatcgtaacaaactcaattcatttagatgaagatcgcaaaccatctaacactaaagaattatctgttgctggtttaatcgcacaagctatcattcgtgtatacgaaagagaatcagttagcgtattatttgactaatatttaaaaggcgtttgacgaacatattccaaacgtgtataatagtttcgttcgtgattatacgaataaataaacacttgcaagcaacgatgatgttgatgggtaagtgaggtgctcgttttgagcaaaaatgaaaggtggaaatgagaatggcttcattaaagtcaatcatccgtcaaggtaaacaaacacgttcagatcttaaacaattaagaaaatctggtaaagtaccagcagtagtatacggttacggtactaaaaacgtgtcagttaaagttgatgaagtagaattcatcaaagttatccgtgaagtaggtcgtaacggtgttatcgaattaggcgttggttctaaaactatcaaagttatggttgcagactaccaattcgatccacttaaaaaccaaattactcacattgacttcttagcaatcaatatgagtgaagaacgtactgttgaagtaccagttcaattagttggtgaagcagtaggcgctaaagaaggcggcgtagttgaacaaccattattcaacttagaagtaactgctactccagacaatattccagaagcaatcgaagtagacattactgaattaaacattaacgacagcttaactgttgctgatgttaaagtaactggcgacttcaaaatcgaaaacgattcagctgaatcagtagtaacagtagttgctccaactgaagaaccaactgaagaagaaatcgaagctatggaaggcgaacaacaaactgaagaaccagaagttgttggcgaaagcaaagaagacgaagaaaaaactgaagagtaattttaatctgttacattaaagtttttatactttgtttaacaagcactgtgcttattttaatataagcatggtgctttttgtgttattataaagcttaattaaactttattactttgtactaaagtttaattaattttagtgagtaaaagacattaaactcaacaatgatacatcataaaaattttaatgtactcgattttaaaatacatacttactaagctaaagaataatgataattgatggcaatggcggaaaatggatgttgtcattataataataaatgaaacaattatgttggaggtaaacacgcatgaaatgtattgtaggtctaggtaatataggtaaacgttttgaacttacaagacataatatcggctttgaagtcgttgattatattttagagaaaaataatttttcattagataaacaaaagtttaaaggtgcatatacaattgaacgaatgaacggcgataaagtgttatttatcgaaccaatgacaatgatgaatttgtcaggtgaagcagttgcaccgattatggattattacaatgttaatccagaagatttaattgtcttatatgatgatttagatttagaacaaggacaagttcgcttaagacaaaaaggaagtgcgggcggtcacaatggtatgaaatcaattattaaaatgcttggtacagaccaatttaaacgtattcgtattggtgtgggaagaccaacgaatggtatgacggtacctgattatgttttacaacgcttttcaaatgatgaaatggtaacgatggaaaaagttatcgaacacgcagcacgcgcaattgaaaagtttgttgaaacatcacgatttgaccatgttatgaatgaatttaatggtgaagtgaaataatgacaatattgacaacgcttataaaagaagataatcattttcaagaccttaatcaggtatttggacaagcaaacacactagtaactggtctttccccgtcagctaaagtgacgatgattgctgaaaaatatgcacaaagtaatcaacagttattattaattaccaataatttataccaagcagataaattagaaacagatttacttcaatttatagatgctgaagaattgtataagtatcctgtgcaagatattatgaccgaagagttttcaacacaaagccctcaactgatgagtgaacgtattagaactttaactgcgttagctcaaggtaagaaagggttatttatcgttcctttaaatggtttgaaaaagtggttaactcctgttgaaatgtggcaaaatcaccaaatgacattgcgtgttggtgtggatatcgatgtggaccaatttcttaacaaattagttaatatggggtacaaacgggaatccgtggtatcgcatattggtgaattctcattgcgaggaggtattatcgatatctttccgctaattggggaaccaatcagaattgagctatttgataccgaaattgattctattcgggattttgatgttgaaacgcagcgttccaaagataatgttgaagaagtcgatatcacaactgcaagtgattatatcattactgaagaagtgatcagccatcttaaagaagagttaaaaactgcatatgaaaatacaagacccaaaatagataaatcagtgcgcaatgatttgaaagaaacgtatgaaagctttaaattattcgaaagtacatactttgatcatcaaatactacgtcgcttagtagcgtttatgtatgaaacaccttcgacaattattgagtatttccaaaaagatgcaatcattgcagttgatgaatttaatcgtattaaagaaactgaagaaagtttaacagtagagtctgattcgtttattagcaatattattgaaagtggtaatggatttataggacaaagttttataaaatatgatgattttgaaacattgattgaaggctatcctgtcacttatttttcattattcgctacaacaatgccgataaaactaaatcatattattaaattttcatgtaaacctgtccaacaattttatgggcaatatgacattatgcgttctgaatttcaacgatatgttaatcaaaactatcatatcgtggttttggtcgaaaccgaaactaaagttgaacgtatgcaagcgatgttaagtgaaatgcatattccatcaataacaaaattgcatcgctcaatgtcatcggggcaagcagtgattattgaaggcagtttatctgaaggatttgaactacctgatatgggattagttgtcattactgagcgtgagctttttaaatcaaaacagaaaaagcaacgaaaacgtacgaaagctatctcaaatgctgaaaaaattaagtcttaccaagatttaaatgtgggagattatattgttcatgtgcatcatggtgttggtagatatttaggtgttgagacgctcgaagtggggcaaacgcatcgtgattatattaaattgcaatataaaggtacggatcaactatttgttccagtagatcaaatggatcaagttcaaaaatatgtagcttcggaagataagacgccaaaattaaataaactcggtggcagtgaatggaaaaaaacaaaagctaaagttcaacaaagtgttgaagatattgctgaagagttgattgatttatataaagaaagagaaatggcagaaggttatcaatatggggaagacacagctgagcaaacaacatttgaattagattttccatatgaacttacgcctgaccaagctaaatctatcgatgaaattaaagatgacatgcaaaaatcgcgtccaatggatcgcttgctatgtggtgatgttggttatggtaaaactgaagttgcagtgagagcagcattcaaagctgtaatggaaggaaagcaggttgcatttttagttcctacaactattttagctcagcaacattatgagacgttaattgagcgtatgcaagattttcctgttgaaattcaattaatgagtcgttttagaacgcctaaagagataaaacaaactaaggaaggacttaaaactggatttgttgacatagttgttggtacacacaaattacttagtaaagatatacagtataaagatttagggctgttgattgtagatgaagaacaacgatttggtgtacgccataaagagcgtattaaaacattaaaacataatgtagatgtactaacattgactgcaaccccaatacctagaacattgcatatgagtatgctaggtgtgcgggatttgtcagtgattgaaacgccgccagaaaatcgtttcccagttcaaacatatgtattagaacagaacatgagttttatcaaagaagctttagaaagagaactatcccgtgatggccaagtgttttatctttataataaagtgcaatccatttatgaaaaacgagaacaactccagatgttaatgccagatgctaacattgcagttgctcatggacaaatgacagagcgcgatttagaagaaacgatgttaagttttatcaataatgaatatgatattttagtaacgacgacgattattgaaacaggtgtcgatgtcccaaatgcaaatactttgatcattgaagatgcagatcgctttggattgagtcagttgtatcaattaagaggtcgtgttggtcgttcaagtcgtattggttatgcatacttcttacatccagcaaataaggtactaactgagactgcagaagatcgattacaagcgattaaagaatttacggagttaggctcaggatttaagattgcgatgcgtgatttgaacattcgtggtgctggtaatttgttaggtaaacaacagcacggctttattgatacagttggatttgatttgtacagtcaaatgttagaagaagctgtaaatgaaaaacgtggtattaaggaaccagaatctgaggtgccagaagtcgaagttgatttaaacttggatgcatatttgccaacagaatatattgcaaatgaacaagctaaaattgaaatttataaaaagctacgaaaaactgaaacatttgatcaaattatcgacattaaagatgaattaattgatcgtttcaatgattatcctgttgaagtagcacgtttgcttgatatagtggaaataaaagtacacgcattacattcaggtatcacgttgattaaagataaagggaaaataattgatattcatttatctgtaaaagccactgaaaatattgatggcgaagtgctgttcaaagcaacacaacttttaggtagaacaatgaaggttggtgttcaaaataatgcaatgacaattactttaacgaaacaaaatcaatggcttgatagtttgaagtttttagttaagtgcattgaagaaagtatgagaatcagtgatgaagcataaagaagcatttaatggcgttgtcgtgttaactgctgcattaattgtcattaaaattctgagtgctgtatatcgaattccatatcaaaatatattaggcgatacaggtttgtatgcatatcaacaagtgtatccaattgtagcattaggaatgatattatcgatgaatgccattcctagtgcaattacacaaaatatagggaagtatcatagtgacgaagcatatgcaaaagcagtcgcttatatacaattagttggtatattattatttattgctatttttgtgtttgcgaacaatattgcacatatgatgggtgatggccatttaacaccaatgattcaagctgcaagtttaagctttatatttataggtatgcttggcgtgttaagaggttattatcaatctgcaaataatatgacagttccggctatttcccaggttatagaacaagttatacgagtaggtattatcattgttactattgttatttttgtagacagaggttggacgatatatgaagcgggaacaattgctattttagcatcaacgataggttttttaggttcttcaatttatttagtagcgcaccgaccttttaagtttaaaatggtaaataacactgcaaagatcgtttggaaacagttcgcactttcggttttgattttcgctatcagtcaattaatcgtaattttatggcaagtgattgatagtgttactattattaagtcacttcaagcgatacgcgtgccattcgatgttgccataactgaaaaaggagtctatgaccgtggtgcatcatttattcagatgggattgattgtaactacaacatttagttttgcgctcattcctctgttaagtgacgcaatcaaaatgaataatcaggtacttatgaatcgttatgcaaatgcgtcattaaagattacgattttaataagtacagcagcgggaataggattaattaatttattgcctttaatgaacggtgtgttttttaagacgaatgatttaaccttaacgttaagtgtttatatgattacggtcatttgtgtatcgttaattatgatggatatggcattattacaagcgcaacatgctgtgagacctatttttgttggtatgacggcaggattggttattaaatttatacttaatatcattttgattcgtttaagtggcattattggtgcgagcattagtactgttgtatcattaattatattcggtacgattatccatattgctgtcacgagaaaataccacttatatgcgatgagacgattttttatcaatgttgttttaggtatggtatttatgtcgattgttgttcaatgcgtgttaaacatagtgacaacacacggtagaatcactggactcattgaattattatgtgcagcagtattaggtatcattgcattgtttttctatatttttagatttaatgttttgacatataaagagttaacttatttaccatttggttcaaagttgtatcaaattaagaaaggaagacgttgatggcacataccattacgattgttggcttaggaaactatggcattgatgatttgccgctagggatatataaatttttaaagacacaagataaagtttatgcaagaacgttagatcatccagttatagaatcattgcaagatgaattaacatttcagagttttgaccatgtttatgaagcacataaccaatttgaagatgtctatattgatattgtggcgcaattggttgaagctgctaatgaaaaagatattgtctatgcggttccgggtcatcctagagttgctgagacaactacagtgaaattactggctttagcaaaggacaatactgatatagatgtgaaagttttaggtgggaaaagctttattgatgatgtgtttgaagcagttaatgtagatccaaatgatggcttcacactgttagatgcgacatcattacaagaagtaacacttaatgttagaacgcatacattgattacgcaagtttatagtgcaatggttgctgctaatttgaaaatcactttaatggaacgatatcctgatgattaccctgttcaaattgtcactggtgcacgaagcgatggtgcggataacgttgtgacatgcccattatatgaattggatcatgatgaaaatgcattcaataatttgacgagtgtattcgtaccaaaaatcataacatcgacatatttgtatcatgactttgattttgcaacggaagtgattgatactttagttgatgaagataaaggttgtccatgggataaagtgcaaacgcatgaaacgctaaagcgttatttacttgaagaaacatttgaattgttcgaagctattgacaatgaagatgattggcatatgattgaagaactaggagatattttattacaagtgttattgcatactagtattggtaaaaaagaagggtatatcgacattaaagaagtgattacaagtcttaatgctaaaatgattcgtagacacccacacatatttggtgatgccaatgctgaaactatcgatgacttaaaagaaatttggtctaaggcgaaagatgctgaaggtaaacagccaagagttaaatttgaaaaagtatttgcagagcattttttaaatttatatgagaagacgaaggataagtcatttgatgaggccgcgttaaagcagtggctagaaaaaggggagagtaatacatgagattagataaatatttaaaagtatcacggttaataaagcgacgtacgctagcaaaagaagtaagtgatcaaggtagaattacaataaatggtaatgttgctaaagctggatcggatgttaaagttgaagatgtgctgacgattcgctttggtcaaaaattagtaacagttaaagtaactgcattaaatgaacatgcatctaaagataacgcgaagggtatgtatgaaatcattgaagagcgtcgacttgaagaagcgtaaattggaggtgacaagcaatgaaaaataaagtagaacatatagaaaatcagtacacgtcgcaagagaacaagaaaaaacaacgtcaaaaaatgaaaatgcgtgttgttcgtaggcgtattacagtatttgcgggcgtattacttgcgataattgttgttttatcaatcttgcttgttgtccaaaaacatcgcaatgatattgatgcacaggagcgaaaagcgaaagaagcacagtttcaaaagcaacaaaatgaagaaattgcgttaaaagaaaagttgaataatctgaatgacaaagattacattgaaaaaattgcgcgtgatgattattacttaagcaacaaaggtgaagtgatttttaggttgccagaagacaaagattcgtctagctcaaaatcttcgaaaaaataaatccaaattgattcaaaattatccgagtatagacattgtgaaaaaatccaaacaaggatataataagggaaaatcgaatcaaatcgggaggatttatttaacatatgtcaatcgaagttggaaataagcttaaaggtaaagtcactggtattaaaaagtttggtgcattcgtagaattacctgaaggaaaaagtggtttagttcacattagtgaagtcgcagataattatgttgaaaacgtagaagagcacctttctgttggtgatgaagtagacgtaaaagtattatctattgctgatgatggaaaaattagtctttcaattaagaaagctaaagaccgtccacgtagacaacatacgagtaaaccaagtcatcaaaaaccagtgcaaaaagccgaagattttgaaaagaaattaagcaatttcttaaaagatagtgaagataaattaacttcaatcaaacgtcaaacagaatctagacgcggtggcaaaggttcaagacgttaattaaaataaataaagactgtttcgataaggaatatatttagaatgatgcgtatcgaataatcgattgcagcgttagacaatctaagactgtttcttaaataaggagcagtctcttttatttgtaatgatataactaagacttataccatttttgaaaattgtaaaagtgaggtgatgttatgcagttaaatagtaatggttggcatgttgatgaccatattgttgtcgctgtttctacaggtattgatagtatgtgtttattgtatcaactactaaatgattataaagatagttatagaaaactaacatgcttacatgtcaatcatggcgttaggtcagcttcaattgaggaagccagatttttagaagcatactgcgaacgtcatcacatcgatttacatatcaaaaagttagatttgtcgcatagtctcgaccgaaataacagcattcagaatgaagctcgaattaaacgttacgaatggtttgatgaaatgatgaatgtattagaagcggatgtattgctaacggcgcatcatttggacgatcaattagaaactattatgtatcgtatttttaatgggaaatcaacacgtaataaactaggatttgatgagttatcgaagcgaaaaggttatcagatttatcgaccacttttagctgtctctaaaaaagaaataaaacaattccaagagagatatcatattccatattttgaagatgaatctaataaagataacaaatatgttagaaatgatattcgtaatagaattattccagctattgatgaaaataatcaacttaaagtatcgcatttattaaaattaaaacaatggcatgatgaacaatatgatattttgcaatattcagctaaacaatttattcaagaatttgtgaagtttgatgaacagtcaaaatatttagaggtttctagacaagcttttaataacttaccaaactcattaaagatggttgtgttggactgcctattatcaaagtattatgagttgtttaatattagtgctaaaacatacgaagagtggtttaaacaatttagtagtaagaaagcacaattcagtattaatctcacggataaatggataattcaaatcgcatatggtaaattaataataatggctaaaaataatggcgatacatattttagagttcaaacaattaaaaagccaggtaattatatttttaacaaatatcgattagagatacattctaatttaccaaaatgtttatttccgcttacagtgagaacacgacaaagtggcgatacatttaaactgaatgggcgcgatggttataagaaagtgaatcgcctgtttatagattgtaaagtgccacagtgggttcgggatcaaatgccaatcgtattggataaacaacagcgcattattgcggtaggagatttatatcaacaacaaacaataaaaaaatggattataattagtaaaaatggagatgaatagcgttatgcataatgatttgaaagaagtattgttaactgaagaagatattcaaaatatctgtaaggaattgggagcacaattaacaaaggattatcaaggtaaaccattagtatgcgtgggtatcttaaaaggctcagcaatgtttatgtcagatttaattaaacgaattgatacccatttatcaattgatttcatggatgtttctagttatcacggaggcactgagtcaactggtgaagttcaaatcattaaagatttaggttcttctattgaaaataaagacgtattaattattgaagatatcttagagactggtactacacttaagtcaattactgaattattacaatctagaaaagttaattcattagaaatagttactttattagataaaccaaaccgtcgtaaagcggacattgaagctaagtatgtaggtaaaaaaataccagatgaatttgttgttggttacggtttagattatcgtgaattataccgaaacttaccatatatcggtacgttaaaacctgaagtgtattcaaattaattttttaatcaatttcagttattattactatgcgtttgagaaataatagtgtagactcaaaaatatgaaaaatgtatttcatatatatttaattttagacaagacatatgtcttgaaaagttgaaaaatatagagattgataaaactaatacgggtgtgaatgacattgatgttaagctcaattactagcttataaaacatgtcatatgttacaatttttgttagttttattatgggaagtaggaggaaatgacgcatgcagaaagcttttcgcaatgtgctagttatcgtaataataggcgttattatttttggtctattttcatatttaaacggtaatggaaatatgccgaaacagcttacatataatcaatttactgagaagttggaaaaaggtgaccttaaaactttagaaatccaaccacaacaaaatgtctatatggtaagtggtaaaacgaaaaatgatgaagactattcatcaactattttatataacaacgaaaaagaattacaaaaaattactgatgctgctaaaaagcaaaacggtgtaaaattaacgattaaagaagaagaaaaacaaagtgtctttgtgagtatactttcaacattaattccagttgtagtcatagcgttattatttattttcttcctaagccaagcacaaggtggcggtagtggcggtcgtatgatgaactttggtaaatctaaagcaaaaatgtacgataataataaacgtcgtgttcgtttctctgatgtagcaggggcagatgaagaaaaacaagaattaattgaaattgttgatttcttgaaagataataaaaaattcaaagaaatgggatctaggattcctaaaggtgtcttacttgttggacctccaggtactggtaaaacattacttgctagagcggttgcaggtgaagctggcgcaccattcttctctattagtggttcagactttgtagagatgtttgttggtgttggtgcgagccgtgttcgtgacttattcgataatgctaagaaaaacgcgccttgtatcatctttatcgatgagattgatgctgttggtcgtcaacgtggtgcaggtgttggtggcggtcatgatgaacgtgaacaaaccctaaaccaattattagttgaaatggatggtttcggtgaaaatgaaggtatcattatgatagctgctacaaaccgtcctgatatccttgacccagccttattacgtccaggtcgttttgatagacaaattcaagttggtcgtccagatgtgaaaggccgtgaagcaattcttcatgttcatgctaaaaacaaaccacttgatgaaacggttgatttaaaagcaatttcacaacgtacacctggtttctcaggtgctgatttagagaacttattaaatgaagcatctttaattgctgtacgtgaaggtaaaaagaaaattgacatgagagatatcgaagaggcaacggatagagttatagccggacctgctaagaaatctcgagttatttctaagaaagaacgtaatattgttgctcatcacgaagctggtcatacaattatcggtatggtacttgatgaggcagaagtagtgcataaagttactattgttccacgtggacaagcaggtggttatgcaatgatgctacctaaacaagatcgtttcttaatgactgaacaagagttattagataaaatctgtggtttacttggtggacgtgtatcagaagatattaactttaacgaagtatcaacaggtgcttcaaatgacttcgaacgtgcaacacaaatcgcacgctcaatggttacgcaatatggtatgagtaaaaaattaggaccattacagttcggtcatagcaatggtcaagtattcttaggtaaagatatgcaaggtgagcctaattattcaagccaaatcgcatatgaaattgataaagaagttcaacgaatcgttaaagaacaatacgaacgttgtaaacaaattttattagagcacaaagaacaattaattttaattgctgaaacattattaacagaagaaacattagttgctgaacaaattcaatcattattctacgaaggtaaattacctgaaattgattatgatgcagctaaagttgttaaagatgaagattctgaatttaatgatggtaaattcggtaaatcttatgaagagattcgtaaagagcaattagaagatggacaacgtgacgaaagtgaagatcgtaaagaagaaaaagatattgctgaggataaaaaagaagctgataaatctgatgaaaaagatgaaccagcacatcaacaagccccaaatatcgaaaaaccttacgatccaaatcacccagacaataaataatcgattatattcagtacctctttctatgataaagttatagaaagaggtacttttatcgtttttgaaaatacgtattagattttaagtcgttgaattgttatagcagaaaataattgtaaaacaagttacttcattatttagaatgatgggtgtagaataagtacaattgttgcattttatgaagtaaagtaattttttaaatatagagtaatagaggagattgaaataatgacacacgattatattgttaaagcattagcatttgatggagagattagggcttatgctgctttgacaactgaaactgttcaagaagcacaaacgagacattatacatggccgacagcatctgctgcaatgggaagaacaatgacagcaacagctatgatgggcgcaatgttgaaaggtgatcaaaaattaactgtcactgtagatggccaaggacctattggacgaattattgccgatgcaaatgctaaaggcgaggtgcgtgcttatgtagaccatccacaaactcattttccattaaatgagcaaggtaaacttgatgtaagacgagcggtagggacaaatggatctattatggttgttaaagacgttggaatgaaagactatttctctggagcaagtccaattgtttcaggagaacttggtgaagattttacttattattatgctacaagtgaacaaacaccttcatcggtaggtcttggtgtattggtaaatcctgataatacgattaaagcagcaggaggatttatcattcaagttatgccaggtgccaaagatgaaacaatttcaaaattagaaaaagcaattagtgaaatgacaccagtttctaaattaattgaacaaggattaacgccagaaggattactaaacgaaatcttaggtgaagaccatgtgcaaattttagagaaaatgcctgttcaatttgaatgtaattgtagtcatgagaaatttttaaatgctattaaaggattgggcgaggctgagattcaaaatatgattaaagaagatcatggtgctgaagcagtatgtcatttctgtggaaataaatataaatatactgaagaagaattaaacgtgttgctagaaagtttagcgtaatttaatttaaatcaatacgctaaaatgtttatttttagcggtttagtgaaatgtagaactaaatagttgtataatccttagtgattttgtttgctttctagaatttatttgataaaataattctatatccgataaataaactaagatttcaacaactaactaaaaaggagtgttcttaatggcacaaaaaccagtagataatattactcaaattattggcggtacaccggtagtcaaattgagaaatgtagtagatgacaatgcagcagatgtttatgtaaaattggaatatcaaaatccaggtggttctgtaaaggatagaattgctttagcaatgattgaaaaagcagagcgagaaggcaaaattaaacctggcgatacaattgtagaaccaacaagtggtaatacaggtatcggtttagcatttgtatgtgctgctaaaggatataaagcagtatttactatgcccgaaacaatgagccaagagcgtcgtaatttattaaaagcatacggtgcggaattagttttaacgcctggatcagaagcgatgaaaggtgcaattaaaaaagctaaagaattgaaagaagaacatggttacttcgagccacaacaatttgaaaaccctgcgaaccctgaagttcatgagttaactacaggtcctgagttattacaacaatttgaagggaaaactatcgatgcgttcctagctggtgttggtactggtggtacgttatctggtgtaggtaaagttctgaaaaaagaatatcctaacatcgaaattgttgctatagagcctgaggcttctccagtattgagcggtggtgagccaggtccacataaattacaaggtttaggtgctggatttattccaggcactttgaatacagaaatctatgacagtattattaaagtaggaaatgatacagcgatggaaatgtctcgtcgagttgctaaagaggaaggtattttagcaggtatttcatcaggtgctgcgatttatgctgccattcaaaaagcaaaagaattaggaaaaggtaaaacagtagtaacagtattgccgagtaatggtgaacgctacttatcaacacctttatattcattcgatgactaattaatgtcatttaaaagagtgagttatctttttgagataacttgctctttttttctaccatgtatatttttaaaaatatgagcgttaaattaaacatttttctgataaaaatatccagtgaatgataagataataaacgtacatactaataactagtaaatagcaggagtaaattttattagagttaaacaatacataattaaagggtggttaacatgactaaaacaaaaattatgggcatattaaacgtcacacctgattcattctcagatggtggaaaatttaacaatgttgaatcagctataaatagagtgaaagccatgatagatgaaggtgctgacattatagatgttggaggtgtttcaacgagacccggtcatgaaatggtttcattagaagaagagatgaacagagtattacctgttgttgaagctattgtcggttttgatgtaaaaatttcagtcgatacatttcgaagtgaggttgctgaagcatgtttaaaattaggcgttgatatgattaatgatcaatgggcgggtctgtatgatcatcgtatgttccaaattgtagctaaatatgacgcggaaattattttaatgcataatggaaatggtaatcgtgatgaaccggttgtcgaagaaatgttaacatctttgttagcacaagcacatcaagctaaaatagctggtataccttcaaataaaatttggctagatccaggtataggtttcgctaaaactagaaatgaagaagccgaagttatggcaagactggatgaacttgttgcaacagaatatccagttttattagcgacaagccggaaacgtttcactaaagagatgatgggttatgatacaacaccggttgaaagagatgaagtaactgcagctacgactgcatatggtattatgaaaggcgttagagcagtacgcgttcataatgtcgagttgaatgctaaattagctaaaggtatagattttttaaaggagaatgaaaatgcaagacacaatctttcttaaaggtatgcgcttttatggatatcatggtgctttatcagctgaaaatgaaatagggcaaattttcaaagtggatgtaactttgaaagtagacttagctgaagctgggcgtactgataatgttattgatacagttcattatggtgaagtgttcgaagaggttaaatcaattatggaaggtaaggccgttaatttacttgagcatctagctgaacgtattgcaaatcgtataaattcacaatataatcgtgtaatggaaacgaaagtgagaatcactaaagaaaacccaccgattccgggtcattatgatggagtaggtatcgaaatagtgagggagaataaatgattcaagcatacttaggattaggtagtaatattggtgatagagaaagccagttaaacgatgctataaagattttgaatgaatatgatggtattaacgtatctaatatttctccgatttatgaaacagcaccagttgggtatactgagcaacctaactttttaaatttgtgtgttgaaattcaaacaacactcacagtattacaactgttggaatgttgtttgaagacagaagaatgtttacaccgtattagaaaggaacgatggggtcctagaactttagatgtggatattttgttgtatggagaagaaatgatagatttaccaaaactgtcggtgccacatccgagaatgaatgaacgtgcatttgttttaatcccattaaatgatatagcagcaaatgtcgtagaaccacgttcgaaattgaaagtgaaagatttagtttttgtcgatgacagtgtaaagagatataaataatgtattgttgagaacattcatatttattgggaatagattattgattattggagatgtttccgcattttgattatctctaaatgcatttgatttcgaattagtatatgatgatttagtatgtgttagaattaagttatttcataaaatcaaagtaagcaatatttgataaattgctgtaatttatttaggcttttgttgaagtttgtggaagataatttttatacatttacttagggttgtattaatgataatcgtattttaaatgaataagtaattcataaacgaaaacagaaattgctttattacatttacaagctcttgtaaaattaaaaaagtgataaaattgatgttatgaatataagaaaacatgccacatcataactttaaggtgtaatggttaatgataaagtattagaaacatcgaaagagatgtatgttgagcaaaaatgtctgatattttataaaactttaaaggaaaatgtttgagtgtaccagttggaatactaaaggattacaacaagttaaaggagagaaagttatgtcagaagaaatgaatgaccaaatgttggttcgacgtcaaaaattacaagaattatatgatcttggtatagacccgtttggttctaaatttgaccgttcaggtttatctagtgatttgaaagaagagtgggaccagtattctaaagaagaattggtagaaaaagaagcggatagtcatgtcgctatagctggacgattaatgactaagcgtggtaaaggtaaagcaggatttgcacacgttcaggacttagctggacaaattcaaatttacgttcgtaaagatcaagttggcgatgacgaatttgatttatggaaaaatgctgatttaggcgatatcgttggtgttgaaggtgtaatgttcaaaacaaatactggcgaattatcggttaaagcgaagaaattcacgctactaactaaatcattgcgaccattaccggataaattccacggtttacaggatattgaacagagatatcgtcaaagatatttagatttaattacgaacgaagatagcactcgtacatttattaatcgtagtaaaatcattcaagaaatgcgtaattatttaaataataaaggtttcttggaagtagaaacacctatgatgcaccaaattgctggtggagcagctgctagaccatttgtaacacatcataatgcattagatgcaacgttatacatgcgtattgctattgagttgcatttaaaacgtttaattgtcggtggacttgaaaaagtatatgaaattggtagagtattccgtaatgaaggtgtatcaactagacataaccctgaattcacaatgattgaattatatgaagcatatgcagattatcatgacattatggatttaacagaatctatggtgagacatattgccaatgaagtgttaggttctgcaaaagtacaatacaatggggaaacgattgatttagaatctgcttggactcgtttgcatattgttgatgctgtaaaagaagctactggtgtagatttttatgaagttaaaagtgatgaagaagctaaagctttagctaaagaacatggtattgaaattaaagatacaatgaaatatggtcatattttaaatgaattctttgagcaaaaagttgaagaaacacttattcagccaacgtttatctatggtcatccgactgaaatttcacctttagcgaagaaaaatcctgaagatcctagatttactgatcgtttcgaattgttcattgtaggtagagagcatgcaaatgcatttactgaattaaatgatcctattgatcaaaaaggtcgttttgaagcgcaacttgttgaaaaagcgcaaggtaatgatgaagcgcatgaaatggatgaagattacattgaagcgttagaatatggtatgcctccgacaggtggtcttggtatcggtattgacagattggttatgttattaactgactctccatcaatcagagacgtattattattcccttatatgagacaaaaataaatgacgttgattgttagtaagagctctcgtgtatacaacatgtgtatgcgagggctttcttaattatggtaattagttcgtgtttgaatgtttttgatagtaatagttaacgatagtggtgctatttttgactgttaaacaaggtagttggctgatagatgaaaatgacgatacgtatatagagtagttcggatgagaaatgttaacgatagacattgagatatcttataacaaaaattgctatattagtataatttatcttaatcagctataaaagtactttaaaattgtatagaatgtgtatggttttgtacatatgtgtatgatagaatactaaaagtgttatgaattagagggcacgagaaatgtcagttttgaagaataaaaaagttgattaaaagtgttgactttatcaattgaatgaagtaatatataaaagtcgtcaaaaacagacgaaacacactaaaagctgatgtgacaaagtttacatcaaagtgtaaaattaactattgcaccttattaattaagcgtgtattatgaataagtaagttattttgtctggtgactatagcaaggaggtcacacctgttcccatgccgaacacagaagttaagctccttagcgtcgatggtagtcgaacttacgttccgctagagtagaacgttgccaggcaaatgacaaatcggagaattagctcagctgggagagcatctgccttacaagcagagggtcggcggttcgaacccgtcattctccaccatttattcttagatatagccggcctagctcaattggtagagcaactgacttgtaatcagtaggttgggggttcaagtcctctggccggcaccatcttttgagccattagctcagctggtagagcatctgacttttaatcagagggtcagaggttcgaatcctctatggctcattacgatttaatttttatatttagcaaaataatgcagaagtagttcagcggtagaatacaaccttgccaaggttggggtcgcgggttcgaatcccgtcttctgctccattattttgccggggtggcggaactggcagacgcacaggacttaaaatcctgcggtgagagatcaccgtaccggttcgattccggtcctcggcaccattttagcgcccgtagctcaattggatagagcgtttgactacggatcaagaggttatgggttcgactcctatcgggcgcgccatttttaaattaattgaataacgggaagtagctcagcttggtagagcacttggtttgggaccaaggggtcgcaggttcgaatcctgtcttcccgattacttcttaaattccattttatgggggcttagctcagctgggagagcgcctgctttgcacgcaggaggtcagcggttcgatcccgctagtctccaccatttattttttacacgatnnnnnnnnnnnnnnnnnnnnnnnnnnnnnnnnnnnnnnnnnnnnnnnnnnnnnnnnnnnnnnnnnnnnnnnnnnnnnnnnnnnnnnnnnnnnnnnnnnnnnnnnnnnnnnnnnnnnnnnnnnnnnnnnnnnnnnnnnnnnnnnnnnnnnnnnnnnnnnnnnnnnnnnnnnnnnnnnnnnnnnnnnnnnnnnnnnnnnnnnnnnnnnnnnnnnnnnnnnnnnnnnnnnnnnnnnnnnnnnnnnnnnnnnnnnnnnnnnnnnnnnnnnnnnnnnnnnnnnnnnnnnnnnnnnnnnnnnnnnnnnnnnnnnnnnnnnnnnnnnnnnnnnnnnnnnnnnnnnnnnnnnnnnnnnnnnnnnnnnnnnnnnnnnnnnnnnnnnnnnnnnnnnnnnnnnnnnnnnnnnnnnnnnnnnnnnnnnnnnnnnnnnnnnnnnnnnnnnnnnnnnnnnnnnnnnnnnnnnnnnnnnnnnnnnnnnnnnnnnnnnnnnnnnnnnnnnnnnnnnnnnnnnnnnnnnnnnnnnnnnnnnnnnnnnnnnnnnnnnnnnnnnnnnnnnnnnnnnnnnnnnnnnnnnnnnnnnnnnnnnnnnnnnnnnnnnnnnnnnnnnnnnnnnnnnnnnnnnnnnnnnnnnnnnnnnnnnnnnnnnnnnnnnnnnnnnnnnnnnnnnnnnnnnnnnnnnnnnnnnnnnnnnnnnnnnnnnnnnnnnnnnnnnnnnnnnnnnnnnnnnnnnnnnnnnnnnnnnnnnnnnnnnnnnnnnnnnnnnnnnnnnnnnnnnnnnnnnnnnnnnnnnnnnnnnnnnnnnnnnnnnnnnnnnnnnnnnnnnnnnnnnnnnnnnnnnnnnnnnnnnnnnnnnnnnnnnnnnnnnnnnnnnnnnnnnnnnnnnnnnnnnnnnnnnnnnnnnnnnnnnnnnnnnnnnnnnnnnnnnnnnnnnnnnnnnnnnnnnnnnnnnnnnnnnnnnnnnnnnnnnnnnnnnnnnnnnnnnnnnnnnnnnnnnnnnnnnnnnnnnnnnnnnnnnnnnnnnnnnnnnnnnnnnnnnnnnnnnnnnnnnnnnnnnnnnnnnnnnnnnnnnnnnnnnnnnnnnnnnnnnnnnnnnnnnnnnnnnnnnnnnnnnnnnnnnnnnnnnnnnnnnnnnnnnnnnnnnnnnnnnnnnnnnnnnnnnnnnnnnnnnnnnnnnnnnnnnnnnnnnnnnnnnnnnnnnnnnnnnnnnnnnnnnnnnnnnnnnnnnnnnnnnnnnnnnnnnnnnnnnnnnnnnnnnnnnnnnnnnnnnnnnnnnnnnnnnnnnnnnnnnnnnnnnnnnnnnnnnnnnnnnnnnnnnnnnnnnnnnnnnnnnnnnnnnnnnnnnnnnnnnnnnnnnnnnnnnnnnnnnnnnnnnnnnnnnnnnnnnnnnnnnnnnnnnnnnnnnnnnnnnnnnnnnnnnnnnnnnnnnnnnnnnnnnnnnnnnnnnnnnnnnnnnnnnnnnnnnnnnnnnnnnnnnnnnnnnnnnnnnnnnnnnnnnnnnnnnnnnnnnnnnnnnnnnnnnnnnnnnnnnnnnnnnnnnnnnnnnnnnnnnnnnnnnnnnnnnnnnnnnnnnnnnnnnnnnnnnnnnnnnnnnnnnnnnnnnnnnnnnnnnnnnnnnnnnnnnnnnnnnnnnnnnnnnnnnnnnnnnnnnnnnnnnnnnnnnnnnnnnnnnnnnnnnnnnnnnnnnnnnnnnnnnnnnnnnnnnnnnnnnnnnnnnnnnnnnnnnnnnnnnnnnnnnnnnnnnnnnnnnnnnnnnnnnnnnnnnnnnnnnnnnnnnnnnnnnnnnnnnnnnnnnnnnnnnnnnnnnnnnnnnnnnnnnnnnnnnnnnnnnnnnnnnnnnnnnnnnnnnnnnnnnnnnnnnnnnnnnnnnnnnnnnnnnnnnnnnnnnnnnnnnnnnnnnnnnnnnnnnnnnnnnnnnnnnnnnnnnnnnnnnnnnnnnnnnnnnnnnnnnnnnnnnnnnnnnnnnnnnnnnnnnnnnnnnnnnnnnnnnnnnnnnnnnnnnnnnnnnnnnnnnnnnnnnnnnnnnnnnnnnnnnnnnnnnnnnnnnnnnnnnnnnnnnnnnnnnnnnnnnnnnnnnnnnnnnnnnnnnnnnnnnnnnnnnnnnnnnnnnnnnnnnnnnnnnnnnnnnnnnnnnnnnnnnnnnnnnnnnnnnnnnnnnnnnnnnnnnnnnnnnnnnnnnnnnnnnnnnnnnnnnnnnnnnnnnnnnnnnnnnnnnnnnnnnnnnnnnnnnnnnnnnnnnnnnnnnnnnnnnnnnnnnnnnnnnnnnnnnnnnnnnnnnnnnnnnnnnnnnnnnnnnnnnnnnnnnnnnnnnnnnnnnnnnnnnnnnnnnnnnnnnnnnnnnnnnnnnnnnnnnnnnnnnnnnnnnnnnnnnnnnnnnnnnnnnnnnnnnnnnnnnnnnnnnnnnnnnnnnnnnnnnnnnnnnnnnnnnnnnnnnnnnnnnnnnnnnnnnnnnnnnnnnnnnnnnnnnnnnnnnnnnnnnnnnnnnnnnnnnnnnnnnnnnnnnnnnnnnnnnnnnnnnnnnnnnnnnnnnnnnnnnnnnnnnnnnnnnnnnnnnnnnnnnnnnnnnnnnnnnnnnnnnnnnnnnnnnnnnnnnnnnnnnnnnnnnnnnnnnnnnnnnnnnnnnnnnnnnnnnnnnnnnnnnnnnnnnnnnnnnnnnnnnnnnnnnnnnnnnnnnnnnnnnnnnnnnnnnnnnnnnnnnnnnnnnnnnnnnnnnnnnnnnnnnnnnnnnnnnnnnnnnnnnnnnnnnnnnnnnnnnnnnnnnnnnnnnnnnnnnnnnnnnnnnnnnnnnnnnnnnnnnnnnnnnnnnnnnnnnnnnnnnnnnnnnnnnnnnnnnnnnnnnnnnnnnnnnnnnnnnnnnnnnnnnnnnnnnnnnnnnnnnnnnnnnnnnnnnnnnnnnnnnnnnnnnnnnnnnnnnnnnnnnnnnnnnnnnnnnnnnnnnnnnnnnnnnnnnnnnnnnnnnnnnnnnnnnnnnnnnnnnnnnnnnnnnnnnnnnnnnnnnnnnnnnnnnnnnnnnnnnnnnnnnnnnnnnnnnnnnnnnnnnnnnnnnnnnnnnnnnnnnnnnnnnnnnnnnnnnnnnnnnnnnnnnnnnnnnnnnnnnnnnnnnnnnnnnnnnnnnnnnnnnnnnnnnnnnnnnnnnnnnnnnnnnnnnnnnnnnnnnnnnnnnnnnnnnnnnnnnnnnnnnnnnnnnnnnnnnnnnnnnnnnnnnnnnnnnnnnnnnnnnnnnnnnnnnnnnnnnnnnnnnnnnnnnnnnnnnnnnnnnnnnnnnnnnnnnnnnnnnnnnnnnnnnnnnnnnnnnnnnnnnnnnnnnnnnnnnnnnnnnnnnnnnnnnnnnnnnnnnnnnnnnnnnnnnnnnnnnnnnnnnnnnnnnnnnnnnnnnnnnnnnnnnnnnnnnnnnnnnnnnnnnnnnnnnnnnnnnnnnnnnnnnnnnnnnnnnnnnnnnnnnnnnnnnnnnnnnnnnnnnnnnnnnnnnnnnnnnnnnnnnnnnnnnnnnnnnnnnnnnnnnnnnnnnnnnnnnnnnnnnnnnnnnnnnnnnnnnnnnnnnnnnnnnnnnnnnnnnnnnnnnnnnnnnnnnnnnnnnnnnnnnnnnnnnnnnnnnnnnnnnnnnnnnnnnnnnnnnnnnnnnnnnnnnnnnnnnnnnnnnnnnnnnnnnnnnnnnnnnnnnnnnnnnnnnnnnnnnnnnnnnnnnnnnnnnnnnnnnnnnnnnnnnnnnnnnnnnnnnnnnnnnnnnnnnnnnnnnnnnnnnnnnnnnnnnnnnnnnnnnnnnnnnnnnnnnnnnnnnnnnnnnnnnnnnnnnnnnnnnnnnnnnnnnnnnnnnnnnnnnnnnnnnnnnnnnnnnnnnnnnnnnnnnnnnnnnnnnnnnnnnnnnnnnnnnnnnnnnnnnnnnnnnnnnnnnnnnnnnnnnnnnnnnnnnnnnnnnnnnnnnnnnnnnnnnnnnnnnnnnnnnnnnnnnnnnnnnnnnnnnnnnnnnnnnnnnnnnnnnnnnnnnnnnnnnnnnnnnnnnnnnnnnnnnnnnnnnnnnnnnnnnnnnnnnnnnnnnnnnnnnnnnnnnnnnnnnnnnnnnnnnnnnnnnnnnnnnnnnnnnnnnnnnnnnnnnnnnnnnnnnnnnnnnnnnnnnnnnnnnnnnnnnnnnnnnnnnnnnnnnnnnnnnnnnnnnnnnnnnnnnnnnnnnnnnnnnnnnnnnnnnnnnnnnnnnnnnnnnnnnnnnnnnnnnnnnnnnnnnnnnnnnnnnnnnnnnnnnnnnnnnnnnnnnnnnnnnnnnnnnnnnnnnnnnnnnnnnnnnnnnnnnnnnnnnnnnnnnnnnnnnnnnnnnnnnnnnnnnnnnnnnnnnnnnnnnnnnnnnnnnnnnnnnnnnnnnnnnnnnnnnnnnnnnnnnnnnnnnnnnnnnnnnnnnnnnnnnnnnnnnnnnnnnnnnnnnnnnnnnnnnnnnnnnnnnnnnnnnnnnnnnnnnnnnnnnnnnnnnnnnnnnnnnnnnnnnnnnnnnnnnnnnnnnnnnnnnnnnnnnnnnnnnnnnnnnnnnnnnnnnnnnnnnnnnnnnnnnnnnnnnnnnnnnnnnnnnnnnnnnnnnnnnnnnnnnnnnnnnnnnnnnnnnnnnnnnnnnnnnnnnnnnnnnnnnnnnnnnnnnnnnnnnnnnnnnnnnnnnnnnnnnnnnnnnnnnnnnnnnnnnnnnnnnnnnnnnnnnnnnnnnnnnnnnnnnnnnnnnnnnnnnnnnnnnnnnnnnnnnnnnnnnnnnnnnnnnnnnnnnnnnnnnnnnnnnnnnnnnnnnnnnnnnnnnnnnnnnnnnnnnnnnnnnnnnnnnnnnnnnnnnnnnnnnnnnnnnnnnnnnnnnnnnnnnnnnnnnnnnnnnnnnnnnnnnnnnnnnnnnnnnnnnnnnnnnnnnnnnnnnnnnnnnnnnnnnnnnnnnnnnnnnnnnnnnnnnnnnnnnnnnnnnnnnnnnnnnnnnnnnnnnnnnnnnnnnnnnnnnnnnnnnnnnnnnnnnnnnnnnnnnnnnnnnnnnnnnnnnnnnnnnnnnnnnnnnnnnnnnnnnnnnnnnnnnnnnnnnnnnnnnnnnnnnnnnnnnnnnnnnnnnnnnnnnnnnnnnnnnnnnnnnnnnnnnnnnnnnnnnnnnnnnnnnnnnnnnnnntggatgcgatgagccgcattgagaccgcaaggtctcttttttttatgtctaaaacgtcaaaataaaaagcaaacacaaagaaaaatggcttggcgaagtgaaaacgtttgaatctgacgaaacgagaaaagaacgcaacgagtttagtagagctaaatgagtaagtgagagccgaaggagaggaaagaagcaagcgattgtcacaagtcaagaaaggttcttagcgaggatggtagccaacttacgttccgctagagtagaactggaaatgataatttaataatgtacactttcgattgtctaagtatgtacaactttaattttgtgtttatataaatttaaaatgatatcatcgaaaacaaaatattgtataaatagagaagagcagtaagacggtatctaattgaaaatgatcttactgctcttttatatactttattgaaatacaaaaaggaaattaattattatacaatagacaagctattgcataagtaacactaacttttatcaaagaagtgttactttataattaatgattttattagagcgtctacatgcggttttaaagcatcatcgtctataccgccaaagcctaatataaatttaggggttttcttatagtcttgatcatcatcaaaattataaacttgtaattttaactttactttgtttgctctatcaagacactcttgtaatgttaatccattttttactgtaattgtaaaatgcatacccgtttcagcaccttgaatatcaagctgctctttgtaaggtttcaatctttttaaaatataggttagttttctacgataaattcgtctcattttatttaaatgcctttcaaaaccaccggaagatataaacgttgcaataaggttttgcatatgaacaggtacagtgttgccttcaatgtgattttgagaatgatattttttcattatagaatagggtaacaccatatatgcaactcgacagctaggaaaaatagactttgaaaatgtactgatataaatcactttttctcctcttgaatatagaccttgaattgctggaatgggtttgccgaaatatctaaactcggaatcataatcatcttctataataaatcgttcttctttttcttgagcccattgtattaattgagttcgtttttttaagtccatcacatatccagttggaaattgatgggaaggcgttatatatactatatttttttgtgatttaataacttcatctacgtttattccattatcttcaacttcaatttgttcatattcaacttgttttttatctaaaatatttttgattggtggataactaggtttttcgataataaatgttgaagtataaagtaaatcgactaattgatttactaattgttcggtagatgagccaattataatttgattaggatcacaaattacgccacgattagtaaataaataaaatgccagttgaaaccgcaaatgtaattctccttgaaaatgtcctctacgtaattgatttaaatgatttgtatcataaagatctttggaatactttctgaaaagttctatagggaaatgtttcgtatctatttcatccaaattaaaagcataatcataagcttcatcactcgcttttggtttatatgaatcatcatcaaaaagagaggggataggttgattgtttaaaattgttaaagattcaatttcggacacaaaatatccagagcgaggtcttgaataaatgtaaccttcgtctaatagaagttgatatgcatgctctacggttgtttggctaatagataaatgtttgcttaattgtcttttagaataaaatttatcgccttctttaaattgaccttcaattatttgtttttttaatttttcataaagttgatggtataaagtgtttttcaattttataactgacctcctaaatttatcttattttgtacctttttaaatatcagtttatacattacaatgtatttaatcaacttgaaaaggggttttatgtataatgagtaaaattattggatcagacagagtcaaaagaggtatggctgaaatgcaaaaaggcggcgttattatggatgtcgttaatgctgagcaagcaagaattgcagaagaagctggcgcggtagcagttatggcattagaacgagtaccttctgatattagagctgctggtggtgttgcacgtatggcaaaccctaaaattgtagaagaagtaatgaatgctgtttctattccagtcatggctaaagcacgtattggtcatatcactgaagcaagagtattagaggcgatgggtgttgactatattgatgaatcagaagtgttaacaccagcagatgaggaatatcacttaagaaaagatcaatttacagtaccatttgtatgtggatgtcgtaatttaggtgaagctgcgcgtagaattggtgaaggtgctgctatgttacgtactaaaggtgaaccaggtacaggtaatattgttgaagctgtaagacatatgagacaagttaattcagaagttagtcgattgactgtaatgaatgatgatgagattatgacttttgcgaaagatatcggtgcgccttatgaaattttaaaacaaattaaagacaatggtcgtttaccggtagttaactttgcagctggtggcgttgcgactcctcaagatgctgctttaatgatggaattaggtgctgacggtgtattcgttggatcaggtatttttaaatcagaagatccagaaaaatttgctaaagcaattgttcaagcaacaacacattaccaagactatgaactaattggaagattagcaagtgaacttggcactgctatgaaaggtttagatatcaatcaattatcattagaagaacgtatgcaagagcgtggttggtaagatatgaaaataggtgtattagcattacaaggtgcagtacgtgaacatattagacatattgaattaagtggtcatgaaggtattgcagttaaaaaagttgaacaattagaagaaatcgagggcttaatattacctggtggcgagtctacaacgttacgtcgattaatgaatttatatggatttaaagaggctttacaaaattcaactttacctatgtttggtacatgcgcaggattaatagttctagcgcaagatatagttggtgaagaaggataccttaacaagttgaatattactgtacaacgaaactcattcggtagacaagttgacagctttgaaacagaattagatattaaaggtatcgctacagatattgaaggtgtctttataagagccccacatattgaaaaagtaggtcaaggcgtagatatcctatgtaaggttaatgagaaaattgtagctgttcagcaaggtaaatatttaggcgtatcattccatcctgaattaacagatgactatagagtaactgattactttattaatcatattgtaaaaaaagcatagcttaatgtatgctaaatcaacgaattattgatatttatagatttgttgagaagaaaatatctccttcaaacttagctttggaggagttattttttatgtcaaaattaaaaatgataaaaaataaagctatacataagaaaaaaacccttcaaagagactgagaatagtcaaaattttgaaggggttaattcgatgttgatgtatttgttaaataaagaatccagcgattgcagctgaaatgaaagatactagtgttgcaccgaataataatttcaaaccaaagcgggcaactgtatctccttttttgtcattaagtgatttaatcgcacctgaaataataccgatagagctaaagttagcaaatgatactaagaatacagatgtaacaccttttgcgtgttcagataaatcactaagtttaccaagtgcttgcattgctacaaattcgttagataatagttttgtcgccataactgaaccggcttgaactgcatcttgccatggcacaccgactaagaatgcaaatggtgcaaagacaaaaccaattaatgtttggaaatcccaagaaatagcgccacctgaaactgtactaaagatattgcttacaattccatttaatagagcgataatggcaatgtatccgattaacattgcgcctacaatgacagctactttaaatccatctaaaatatattctcctagcatttcgaagaatgattgttgtctttcttcagtttcttcaactaataatttgtcatcttcttcattaactttataagggttaataattgaagcgatgatgaaaccaccaaataagtttaagacaacagccgttacaacatatttaggttcaattaaggtaaagtatgcaccgataattgaagcagaaacagtcgacattgctgaagctgttaatgtgtataaacgttgcttaggtatgtatggtaattgttttttaattgaaataaatacttcagattgtcccaaaattgctgcagcaactgcattgtatgattctaaacgtcccataccattaattttagaaattaagaatcctaaaacattaatgattaaaggtaaaatctttgtgtattgaaggataccgataatcgctgaaataaatacgataggtaataatacactgaagaagaatggtggttgcttaggatcgatatattgaataccaccgaatacaaagttaacaccatctgctgcttttaataataagtagttaaaaccgtttgaaataccaccaataaccttgattcccattgtagttttaagcaagataaatgcaaagataagctgaattgcaagtaaaattcctacatatttccagcgaatatttttcctgtctgagctaaatagaaacgcaagtgctaaaaagaagataattccgataatcccaattagaatatgcatatatttctcattcctttagttttttctacaatctatcatacaataaaatggaagggctaacatcataaatttttgaaaatataaaaacaaattaattgaaaaaggtcaaaataggtcatataatatagtcaaagaaggtcaaaaaggggtgatatacatgcacaatatgtctgacatcatagaacaatacatcaaacgtttatttgaagagtcgaatgaagatgtcgttgaaattcagagagcgaatatcgcacagcgttttgattgcgtaccatcacaattaaattatgtaatcaaaacacgattcactaatgaacatggttatgaaatcgaaagtaaacgtggtggtggtggttacatccgaatcactaaaattgaaaataaagatgcaacaggttatattaatcatttgcttcagctgattggaccttctatttctcaacaacaagcttattatattattgatgggcttttagataaaatgttaataaatgaacgtgaagctaaaatgattcaagcagttattgatagagaaacgctatcaatggatatggtttctagagatattattagagcaaatattttaaaacgtttgttaccagttataaattattactaaatgaaatgaggtgttgaagtgctttgtgaaaattgtcaacttaatgaagcggaattaaaagttaaagttacaagtaaaaataaaacagaagaaaaaatggtgtgtcaaacttgtgctgagggacaccatccgtggaatcaagctaatgaacaacctgaatatcaagaacatcaagataatttcgaagaagcatttgttgttaagcaaattttacaacatttagctacgaaacatggaattaattttcaagaagtagcgtttaaagaagaaaaacgttgcccatcatgtcatatgactttgaaagatattgcacatgttggtaaatttgggtgtgctaattgttatgcaacatttaaagatgacatcattgatatcgtccgcagagttcaaggtggacaatttgagcacgttggaaagacaccacattcttcacataaaaagatagctttaaagcgaaaaatcgaagaaaagaatgaatatttgaaaaaacttattgaaatccaagattttgaggaagcagccattgttagagatgaaattaaagcactaaaagctgagagtgaggtgcaacatgatgacgcataatattcatgataatatcagccaatggatgaaaagtaatgaagaaacaccaattgttatgtcttctagaattcggttagcgcgtaatttagaaaatcatgtgcatccactaatgtatgctactgaaaatgatggatttagagttataaatgaggtacaagatgccttgccaaactttgaattaatgcgtcttgatcaaatggatcaacaaagtaaaatgaaaatggttgcaaagcatttgattagtcctgaactaataaaacaaccagcagccgcagtattagtgaatgacgatgaatctttaagtgtcatgataaatgaagaggaccatattcgtattcaagctatgggaactgacacgacattacaggctttatataatcaagcttcatcaattgatgatgaattagatcgaagccttgatataagttatgatgaacaacttggttatttaactacatgtcctaccaatataggtactggtatgagagcaagcgtgatgctacatttgccaggtctatctattatgaaaagaatgacacggattgctcaaaccattaatcgttttggatatacaatcagaggtatttacggtgaaggttcgcaagtttatggacatacttatcaagtatccaaccaacttacacttggtaaatctgagttagaaatcatagaaacattaacagaagttgttaatcaaatcattcatgaagaaaaacaaatacgacaaaagttagacacttataatcaattagaaacacaagaccgtgtttttcgctcgctaggtattttacaaaactgtagaatgataactatggaagaggcttcttatagattaagcgaagttaaacttggtatagatttaaattacattgaattacaaaactttaaatttaatgaattgatggtagctatacagtcaccatttttattagatgaagaagatgacaaatctgtaaaagaaaaacgagcagatatactaagagaacatataaagtaggaggtcattatttatgttatttggtagattaactgagcgtgcacagcgcgtattagcacatgcccaagaagaagcaattcgtttaaatcattcaaatataggaacagaacacctattattggggttaatgaaagaacctgaaggaattgctgcaaaagtattagaaagttttaatatcactgaagataaagtaattgaagaagttgaaaaattaatcggacatggtcaagatcatgttggtacattgcattatacacctagagctaaaaaagtcattgaattatcgatggatgaagctagaaaattacatcacaattttgttggaacggaacatattttattaggcttgattcgtgaaaatgaaggtgttgcagcaagagtttttgcaaatctagatttaaatattactaaagcacgtgcacaagttgtgaaagctttaggaaaccctgaaatgagtaataaaaatgcacaagctagtaagtcaaataatactccaactttagatagtttagctcgtgacttaacagtcattgccaaagacggtacattagatcctgttataggacgtgataaagaaattacacgtgtaattgaagtattaagtagacgtacgaaaaacaatcctgtgcttattggagagccaggtgttggtaaaactgctattgctgaaggtttagcgcaagccatagtgaataatgaggtaccagagacattaaaagataagcgtgttatgtctttagatatgggaacagtagttgcaggtactaaatatcgtggtgaatttgaagagcgtctgaaaaaggttatggaagaaatccaacaagcaggtaatgtcatcctatttattgatgagttgcatactttagttggtgctggtggtgctgaaggtgctatcgatgcttcgaatattttgaagccggcattagcacgtggtgaattacaatgtattggtgctactacattagatgaatatcgcaaaaatattgaaaaagacgcggctttagaacgtcgtttccaacctgtacaagttgatgaaccttcagtagtagatacagttgctattttaaaaggattaagagatcgttacgaagcacaccatcgtattaatatttcagacgaagctattgaagcagctgttaaattaagtaacagatacgtttcagatcgtttcttaccagataaagcaattgatttaattgatgaagcaagttctaaagtaagacttaagagtcatacgacacctaataatttaaaagaaattgaacaagaaattgaaaaagttaaaaatgaaaaagatgccgcagtacatgctcaagagtttgaaaatgctgctaacctgcgtgataaacaaacaaaacttgaaaagcaatatgaagaagctaaaaatgaatggaagaatgcacaaaatggcatgtcaacttcattgtcagaagaagatattgctgaagttattgcaggatggacaggtatcccattaactaaaatcaatgaaacagaatctgaaaaacttcttagtctagaagatacattacatgagagagttattgggcaaaaagatgctgttaattcaatcagtaaagcggttagacgtgcccgtgcagggttaaaagatcctaaacgaccaattggtagctttatcttccttggaccaactggtgttggtaaaactgaattagctagagctttagctgaatcaatgtttggcgatgatgatgcgatgatccgtgtagacatgagtgaatttatggaaaaacacgcagtgagccgattagttggtgctcctccaggatatgttggtcatgatgatggtggacaattaactgaaaaagttagacgtaaaccatattctgtaattttatttgatgaaattgaaaaagctcatccagatgtatttaatattctattacaagttttagatgatggacatttgacagatacaaaaggacgtacagttgatttcagaaatacaattatcataatgacatcaaacgttggggcacaagaattacaagatcaacgatttgctggattcggtggttcaagtgatggacaagattatgaaacaattcgaaaaacgatgttaaaagaattaaaaaattcattccgtccagaatttttaaaccgtgtagatgatatcattgtattccataaactaacaaaagaagaattaaaagaaattgtaacaatgatggttaataaattaacaaatcgattatctgaacaaaacataaatattattgtaactgataaagcgaaagacaaaatcgcagaagaaggatatgatccagaatatggtgcaagaccattaattagagcgatacaaaaaactatcgaagataatttaagtgaattaatattagatggtaatcaaattgaaggtaagaaagttacagtagatcatgatggtaaagagtttaaatatgacattgctgaacaaacttcagaaactaaaacaccatcgcaagtataattataaaacagtccaaaacaaattaaagttttgggctgtttttttagtagcattgaactatagaaattcgtgaaagtatccatcaacgaaacaatctaataaaacaatcatcaaaggatagttaagaattatatgtaacaagttaatgagcctacagcgatagcataaaggtatgaatttttataaaggttttttgtttgaagatactagcaacttacgtcaaaataaaataggtctatataatattgtgataaatctagagaaaagagtttactaagaaattattaagattttatctttgaaagataccgactatcaacatgatgtaagtttattttataatattcataaaaaataaatctggtaaaacagtttgcgttagtagtcatgttaaaatacaaacaaatgtaactcacatttaatttgtcataatgggaatgtgcgtttaaaatagatttgttcaaaggaaagtggaggtgcaattttggccaagaaaaaagtgatttttgaatgtatggcttgtggttatcgatctcctaaatggatggggaaatgtcctaattgtggcgcttggaatcaaatggaggaaattgttgaaaaagcagccaatcctaaacatggagttaaaaccaaggaattagcaggtaaagtacaaaaattaaatagtattaaacatgaaacaacgccgagagtgttaacagattcagcagaattcaaccgtgtattaggtggaggtattgtgagcggatcgttagtacttattggtggggatccaggtattggtaagtcaacgttacttttacaaatttgtgcatcgttatctcaaaagaaaaaagtactatatattactggagaagaatcgcttagtcagactaaattacgtgcagagcgattagatgaagattcaagtgaattgcaagtattagctgaaacagatcttgaagttatttatcaaacagtaaaagaagaacaacctgatttattagtagtggattcgattcaaacaatatatcatcctgaaatcagctctgcgccaggttctgtttcacaagttcgtgaaagtacacaaagtttaatgaatattgctaaacaaatgaacattgcaacttttatagtgggtcatgtaacgaaagaaggtcaaattgctggcccaagattgctagaacacatggttgatactgtgctttattttgaaggcgatgaacaccacgcatatcgaattttgcgagctgttaaaaaccgttttggttcaacgaatgaaatgggaatcttcgaaatgaagcaaagtggattaaaaggtgtaaataatccatctgaaatgtttttagaagaacgttcaacaaatgttccaggttcaacaattgttgcaaccatggagggaaccagaccacttttaatagaagttcaagcgctggtaactccaacgacttttaacaatccgagacgaatggcaacagggattgatcataatcgattaagtttgttgatggctgttttggaaaagaaagaaaattatctattacaacaacaagatgcttatatcaaagtagctggcggtgtaaagttaacggagccagcagttgatttaagtgtaattgtagcaactgcatctagctttaaagataaagctgtcgacggattagattgctatattggagaagttggtttaacgggtgaggtacgtcgtgtatctcggatagaacaacgcgtgcaagaggctgcaaaactaggtttcaaacgtgtaattattcctaaaaataatataggcggatggacatatcctgaaggtatacaagtaataggtgtaactactgtacatgaagtattgtcatttgctcttcattcataaaacatcaagaaaggaggacattgtgtgaatatcgttaaactaatggttattattatttacttaattattgggagcgcattaggaataattattattcctgaaattgcaaatgatcttggattacaaaactccagctttttaaaaaatcactatgtagatggcattatcggtagtatttttatgttcttaatttttggtgtatttattagacgagttactaacgctataaaaggtttagaacattttattatgcgtagaagtgctgttgaaatactattcgcaacaataggtttaataatcggattacttatttctgttatggtgtcgtttatattagaatcaattggcaactctatttttaatcatttcattcctgtcataattacgatattactatgttatttcggtttccaatttggccttaaaaaacgagatgaaatgttaatgtttttacctgagaatatagcgcgttccatgtcacaacatactaaaagtgctacgccaaaaattatcgacacaagcgcaattattgatggtcgtattttagaagtcattcgttgcggttttatcgatggcaatattttaattccacaaggtgttattaatgaattacaaattgttgcagattcaaatgacagtgttaaacgtgaaaagggtaaaagaggcttagatattttaaatgaattgtatgatttagactatcctacaaaggttatacatccaactaaaacacatagtgatattgatacgatgttattaaaattagcaaaacaatatcatgcaagtattataacgacagatttcaacctaaataaagtttgtcatgtacatggtatcaaagcattaaatgttaatgatttatcagaagcaatcaaacctaatgtacatcaaggtgatcaactgcatattttactgacaaaaatgggtaaggagcctggtcaggcagtaggatatctagatgatggtacgatggtagttgttgataatgctaaaaatcttattggcagtcatgtcaatttagaagtagtcagcttattgcaaacatcttcaggaagaattgtttttgctaaaaaaatcgaagatacagtatcattataaaaactgtagttgacgaaaacaaaatagatattaaaaggtatatgaaatggcgaagtttgtaatttgaagtataactataaataaatgcaaaacatattagttatcaaaaaatacaaatagtgctaatatatcattgaaacaagttcattaagtgttaaattttagatattaataaagttattcttatagcaatcaagacatacaaaattagaatcaattttaacgtatttgaatagttaatttgaagtttaatttcacagtacataatattcatttttaagtcgttgaaatgtttatgtagtgcagtcttgattcttagggatagcttttttaaagtgttgaaaaaacaacagctttctatttaaaatttaagcatattacccagggaattatgttatgattaaacaatgaaattattttaaggtcatgttaaaaagcattgtttcgttttaacaataagacgagttagacatttgttatgacggtcgaagatagcaaatgaacaatttatatgaactaacttgaaaatctgatatttaatttaggagtgaaaaaaatgagcgatcgtataagagtaagatatgcaccaagtccaactgggtatcttcatattggtaatgcaagaacagcattattcaattacttgtatgctaaacattacaacggagattttgtgattcgaattgaagatactgataaaaaacgtaatttagaagatggagaaacatcacaatttgataatcttaaatggttaggattagattgggatgagtctgtagataaagacaatggctacggaccatatcgtcaatctgaacgtcaacatatctaccaaccattaatagatcagttactagcagaagataaagcatataaatgctatatgacagaagaagaattagaagctgaacgtgaagcgcaaatcgctcgtggtgaaatgcctcgctatggtggtcaacatgcgcatttgactgaagaacaacgtcaacaatttgaagcagaaggacgccaaccatcaattcgtttccgagtacctcaaaaccaaacgtattcatttgatgatatggtaaaaggaaatatttcatttgattcaaatggtattggtgactgggttatcgtaaaaaaagatggcattccaacgtacaattttgcagtagctatagatgatcattacatgcaaatttcagatgtaattcgtggtgatgatcatatttcaaacacgcctaaacaaattatgatttatgaagcatttggctgggagccacctcgttttggtcatatgtcattaattgttaatgaagaacgtaaaaagttaagtaaacgtgatgggcaaattttacaatttattgagcaatatcgtgacttaggttatttacctgaagcgttatttaattttattgcgttattaggttggtctcctgaaggtgaagaagaaatcttttctaaagaagaatttatcaaaatctttgatgaaaagcgtttgtcaaaatcaccagcatttttcgataagcaaaaattagcatgggttaataaccaatatatgaaacaaaaagatactgaaacagtattccaattagcattacctcatttaattaaagcaaatttgattcctgaggtgccgtcagaagaggatttatcttggggacgcaaattaattgcgctttatcaaaaagaaatgagttatgccggtgaaattgtacctttatcagaaatgttctttaaagaaatgccagctcttggtgaagaagaacaacaagtgattaatggagagcaagtaccagagttaatgacgcacttattcagtaaattagaagcacttgaaccatttgaagcggctgaaattaaaaagacaattaaagaagttcaaaaagaaacaggaataaaaggcaagcaattatttatgcctattcgtgttgctgtaacaggccaaatgcatggtcctgaattaccaaatacaattgaagtacttggtaaagaaaaagtgctaaaccgtttaaaacaatataagtaatgaaatagacaagatcaaggtagtatatacttgaattttataacgtaaccacatatgataaagttgtattaacaaattacaacaatatgaataaagtattttatataaaacgaaggattagtaattaaatttatacgatgcagagagtgtacggttgctgtgagtacaacgtagaaattaatgaatgcaccttcgtaaaatgaattaaatatataatgagagtgatgagcattaagttgacttagtttccttgataatttggaagcgcccgcaatattattaatgttattcgctaaattcagagtggaaccgtgcggaagcgcctctaacaatacaacttgtatgttagtggtgcttttttgatatttaatttcgcaggtacttcaattatgtatttacgtagttcaatcattgaggaggaaatgatcttgttaaaaagaatgagagacgatataaaaatggtatttgagcaggatccagcggcacgttcaacattagaagtcattacaacgtatgcaggtttacatgcagtttggagtcatttgattgcacataagttatacaaccaaaaaaaatatgttgcagcacgcgcgatatctcaaatttcaagatttttcacaggtatagaaatccatccaggtgctaaaattggaaagcgtctatttatagatcatggtatgggcgttgtaataggagaaacatgtacaattggtgataatgtgacaatctatcaaggcgtgacacttggtgggacagggaaagaaagagggaaaagacacccagatataggagacaatgttttaatagcagccggtgcgaaagttttaggaaatattaaaataaattcaaatgtaaatattggtgcaaattcagttgttttacaatcagttccaagttattcaacggttgttggtataccaggacatattgttaagcaagatggtgttcgagttggaaaaacatttgatcatcgccatctacctgatccaatttatgaacaaattaagcatttagaacgacaacttgaaaagactaggaatggagagattcaagatgattacattatataatacgcttacacgtcaaaaagaagtgttcaagcctatagaaccagggaaagtaaaaatgtatgtatgtggtcctactgtatataactacattcatattggtaacgcaagaccagcaattaattatgacgtagtgagacgttactttgaataccaaggatataatgtagaatatgtatcaaattttacagacgtagatgataaattaattaaacgttctcaagaattaaatcagtctgttcccgaaattgcagaaaaatatatcgctgcttttcatgaagatgttggtgcgttaaatgttagaaaagcgacttcaaatccaagggtaatggaccatatggatgacattattcaatttattaaagatttggtggatcaaggttatgcatatgaaagtggtggcgatgtttactttagaacacgtaaatttgaaggttatggtaaattaagtcatcaatccatagatgacttaaaagtgggtgctcgtatagatgcaggagagcataaagaagatgcacttgattttacattgtggaaaaaagcgaagcctggcgagattagttgggatagcccatttggtgaaggtagaccaggatggcatatagaatgttctgtaatggcatttcatgagctaggacctacaattgatatacatgcgggtggttcagatttacaatttccacatcatgaaaatgaaatagcacaatcagaagcacataatcatgcgccatttgctaattattggatgcataatggtttcattaatattgataatgaaaaaatgagtaaatcactaggcaactttattttagttcacgatattattaaagaagttgatccagatgtactaagattctttatgattagcgtacattatagaagcccaattaactataatctagaattggtagaatcagcacgtagtggactagagcgtattcgcaatagttatcaattaattgaagagcgcgcacaaattgctactaatattgaaaatcaacagacatatattgatcaaattgatgcgattttaaatcgttttgaaacagttatgaatgatgattttaatacagctaatgcaattacagcttggtatgatttagcaaaacttgcgaataaatatgtactagagaacacaacatcaacagaagtaattgataaatttaaagcagtttatcaaattttcagcgatgttttaggtgtaccgttaaaatctaaaaatgcagatgaattattggatgaagatgttgaaaaattaatcgaagagcgtaatgaagcaaggaaaaacaaagattttgcacgagcagatgaaattcgagacatgctgaaatcacaaaacattatattagaagacacacctcaaggggttagatttaaacgtggataatcaacaagataatcacattaaattattgaatccattgaccttagcatatatgggagacgcagtcttagatcaatatgtacgtacctatatcgttttaaagcttaaaagtaagcctaataaactacatcaaatgtctaaaaaatatgtatctgccaaaagtcaggcgcaaacgttagaatatttaatggagcaagaatggtttacagacgaagaaatggatattttgaagcgagggcgtaacgcgaaaagtcatactaaagctaaaaacactgatgttcaaacatatcgtaaaagttcagcgatagaagcagtgataggttttctttatttagaaaaaagagaagaacgattagaggcattattaaataaaataataacaatagtaaacgaaaggtagtgacgatgtggaagatacggttattgttggtaggcatgctgttagagaagcgattattactgggcatccgataaataagatattgattcaagaaggtattaaaaagcaacaaattaatgaaattttaaaaaatgcaaaagatcaaaaaatcattgttcaaactgtaccaaaatctaaattagattttttagcaaatgcaccacatcagggtgttgcagcgcttattgcaccatatgaatatgctgacttcgatcaatttttaaaacagcaaaaagaaaaagaaggtttattgacagtacttatattagacggcttagaagacccacataacttgggatcaattttaagaacagccgatgcaacgggagttgatggtgttattattcctaaacgtcgttcagttacactaacgcaaacagttgcaaaagcctcaacaggtgcaattgaacatgtaccagttattcgagtgacaaatttagctaaaactatcgatgaactaaaagataatggcttttgggtagctggcactgaagctaataatgcaacagattatagaaatctagaagcggacatgtcattggctattgtaattggtagcgaaggacagggtatgagtcgcctagtaagtgataaatgcgatttttatattaaggttccaatggttggacatgtaaacagtttgaatgcttcggttgcagcaagtttaatgatgtacgaagtatttcgaaaaagacatgatgttggagaaatataatgaaagaacgttacttaatcattgatggatacaatatgataggacaatcaccaacgctaagcgccattgcaaaagagaatttagaagaagctagaatgcaattaatagatgcaattgcaaattataatgcagttatttcagatgaaattatttgtgttttcgatgcttatgaccaatcgggtgttgaaagagaatacatgtatcatggcgttaaaacgatttttaccaaggaaaaagaaacagctgatagtttcatagaacgttatgtttatgaactttatgacaagcatactaagcatattacagttgtaacaagtgatatgagtgagcaacatgctatctttggatcaggtgcatatagaatatcatctcgcgaaatgtggagagatttaaaagaaaatgaaattgatgtgagtaaatcattagatgatataagtgaaaacaagccaagaactcgaattccgttatcttctgaaatccttgcagaatttgaaaaaatacgaagaggacatcataagaaatgacatttccgtcatcttgaaattttgaatgtaacaatattaaactaaccttaaattttagatagaaggggttagtttaatatttgaaatacgatttgacaactcaagacagtacaatcaaacgtaacaatgcaataaatgataaagacttcgaaaagttagtaatggatctacaaccattaattattcgacgcatcaaaacatttggatttaatcattatgatttagaagacttatatcaagaaatacttatacggatgtataggtcggtccaaacatttgattttagtggagagcagcctttcacaaattatgttcaatgtttaattacgtctgtaaagtatgattatttgagaaaatatttagctacaaataaaagaatggataatttgattaatgaatatagagttacgtatccatgtgcaataaagcgttttgatgttgaaaacaattatttgaataaattagcaattaaagagttgatttgtcagtttaagtatttgagtgcatttgaaaaagatgtcatgtatttaatgtgtgaacaatataagccgagagaaattgctcaattgatgcatgtaaaagagaaagtgatttataatgccatacaacgatgtaaaaataaaataaaacgttatttcaaaatgatttgaaaagcgccttaggacgtgaattgaattataacgtgttacttactgatggtttgacatttgttataaattttatgtatagtatactggtattataatgaataaaggtgaattattgtgagaaaaatacctttaaattgtgaagcttgtggcaatagaaattataatgttcctaagcaagaaggctcggcaacaagattaaccttaaagaaatattgtccaaaatgtaacgcgcacacaattcataaagaatcgaaataaatacattcgaaataatactttgataatatgttcaaaggatttggaggttgagcagatggctaaaaaagaaagtttctttaaaggcgttaagtctgaaatggaaaaaacaagttggccgacgaaagaagagctatttaaatatactgtaattgtagtttctactgttatattcttcttagtctttttctatgccttagatttaggaattacagcattgaaaaatttattatttcgttagaggagtgaagacatgtctgaagaagttggcgcaaagcgttggtatgcagtgcatacatattctggatatgaaaataaagttaaaaagaatttagaaaaaagagtagaatctatgaatatgactgaacaaatctttagagtagtcataccggaagaagaagaaactcaagtaaaagatggcaaagctaaaacgactgttaaaaaaacattccctggatatgttttagtggaattaatcatgacagatgaatcatggtatgtggtaagaaatacaccaggcgttactggttttgtaggttctgcaggtgcagggtctaagccaaatccattgttaccagaagaagttcgcttcatcttaaaacaaatgggtcttaaagaaaagactatcgatgttgaactcgaagttggcgagcaagttcgtattaaatcaggtccatttgcgaatcaagttggtgaagttcaagaaattgaaacagataagtttaagctaacagtattagtagatatgtttggccgagaaacaccagtagaagttgaattcgatcaaatagaaaagctttaattaacaattaaagttattaaactaaccaaaagataaaaaagagtattgattttttaattagaaaagtgttaaaattatgtggtcgcgcttttagagcgcccatttcgtcacgaaatgttaagagtgggagggcaaaactgagccctgtgaccacatcacgatatcaaggaggtgcacatcgtggctaaaaaagtagataaagttgttaaattacaaattcctgcaggtaaagcgaatccagcaccaccagttggtccagcattaggtcaagcaggtgtgaacatcatgggattctgtaaagagttcaatgcacgtactcaagatcaagcaggtttaattattccggtagaaatcagtgtttatgaagatcgttcatttacatttattacaaaaactccaccggctccagtattacttaaaaaagcagctggtattgaaaaaggttcaggcgaaccaaacaaaactaaagttgctacagtaactaaagatcaagtacgcgaaattgctaacagcaaaatgcaagacttaaacgctgctgacgaagaagcagctatgcgtattatcgaaggtactgcacgtagtatgggtatcgttgtagaataattttacgaatattaaatttgattacatgatttaaacgatgaagcagataacagagataataatgatgaattataaatataatctgaatgactagattaatgattgatttattcataagattaattcttctgttgtctgctcttaacttgcatatagcaagtaatgtgggaggaaattccgctaaaaccactaaaggaggaactataaatggctaaaaaaggtaaaaagtatcaagaagcagctagtaaagttgaccgtactcagcactacagtgttgaagaagcaattaaattagctaaagaaacaagcattgctaactttgacgcttctgttgaagttgcattccgtttaggaattgatacacgtaaaaatgaccaacaaatccgtggtgcagttgtattaccaaacggaactggtaaatcacaaagtgtattagtattcgctaaaggtgacaaaattgctgaagctgaagcagcaggtgctgactatgtaggtgaagcagaatacgttcaaaaaatccaacaaggttggttcgacttcgatgtagtagttgctacaccagacatgatgggtgaagttggtaaattaggtcgtgtattaggaccaaaaggtttaatgccaaaccctaaaactggaactgtaacaatggatgttaaaaaagctgttgaagaaatcaaagctggtaaagtagaatatcgtgctgaaaaagctggtatcgtacatgcatcaattggtaaagtttcatttactgatgaacaattaattgaaaacttcaatactttacaagatgtattagctaaagctaaaccatcatctgctaaaggtacatacttcaaatctgttgctgtaactacaacaatgggtcctggagttaaaattgatactgcaagtttcaaataataaatgatataaacaattacaggctgaaagaaatatctttcagtctgtaaaaatatattgacaataagtaatttccaagttatattacttattgtgattattttacctaagacagtaggagttatttataacttaaaatttatcctgccgaggctaaaattgacttgaacgtgatgatctatgatctttcaagcactttttgccgtgggtagaaagtgctttttttattaattttaaaaaaagcaccaaaaatttaaatggaggtgtctgaatgtctgctatcattgaagctaaaaaacaactagttgatgaaattgctgaggtactatcaaattcagtttcaacagtaatcgttgactaccgtggattaacagtagctgaagttactgacttacgttcacaattacgtgaagctggtgttgagtataaagtatacaaaaacactatggtacgtcgtgcagctgaaaaagctggtatcgaaggcttagatgaattcttaacaggtcctactgctattgcaacttcaagtgaagatgctgtagctgcagcgaaagtaatttctggatttgctaaagatcatgaagcattagaaattaaatcaggcgttatggaaggcaatgttattacagcagaagaagttaaaactgttggttcattaccttcacacgatggtcttgtatctatgcttttatcagtattacaagctcctgtacgcaacttcgcttatgcggttaaagctattggagaacaaaaagaagaaaacgctgaataatttttagcgtaaaaaaattaaaaataatggaggaattataaaatggctaatcatgaacaaatcattgaagcgattaaagaaatgtcagtattagaattaaacgacttagtaaaagcaattgaagaagaatttggtgtaactgcagctgctccagtagcagtagcaggtgcagctggtggcgctgacgctgcagcagaaaaaactgaatttgacgttgagttaacttcagctggttcatctaaaatcaaagttgttaaagctgttaaagaagcaactggtttaggattaaaagatgctaaagaattagtagacggagctcctaaagtaatcaaagaagctttacctaaagaagaagctgaaaaacttaaagaacaattagaagaagttggagctactgtagaattaaaataattcaagtatcttaaacttaataatcaaagttttatagcaagtattgctataatataatgattctttgagaagttaaaaccccgttattttgataacggggttttattcatttaaagactgagtgaaatgttataattataatgacgagttacaaagtgaagatgaggtggaataatgagtcattattacgatgaagatccaagtgtaattagcaatgaacaacgtattcaatatcaattaaaccatcataaaattgatttaataactgataacggagtgttttcgaaagataaagtagattatggttcagatgttcttgttcaaacttttttaaaagcgcatccacctggtccaagtaagcgaattgccgatgttggttgtggttacggaccaattggtttgatgattgctaaagtatcaccacatcattcaattacaatgctagatgttaatcacagagcgctagccttagttgaaaaaaacaaaaaattaaatggtattgataatgtgatcgtaaaggaaagtgatgctttgtctgctgtggaagacaaaagttttgattttattttaaccaatccaccaataagagcagggaaagaaaccgtgcatcgtatattcgagcaagcattacatagattagactcgaacggtgaactattcgttgtaattcagaagaagcaaggtatgccatctgcaaagaaaagaatgaatgaactttttggaaatgtagaagtggtaaataaagataaaggatattacattctgagaagtataaaagcttgaaatgaaatggatattctgttatagttatataatgtaaaaatttatgttcaataagtgtgtacttttacgttaaatagataagttaattaagaataaatatagaatcgaaaatggtgtcatcattagtgttgccgttttctttttgtctttttattaatatgcttatggtatttagctaaaagcggatcacataatttttgaggggtgaatctgtttggcaggtcaagttgtccaatatggaagacatcgtaaacgtagaaactacgcgagaatttcagaagtattagaattaccaaacttaatagaaattcaaactaaatcttacgagtggttcctaagagaaggtttaatcgaaatgtttagagacatttctccaattgaagattttactggtaatttgtcattagagtttgtggattaccgtttaggagaaccaaaatatgatttagaagaatctaaaaaccgtgacgctacttatgctgcacctcttcgtgtaaaagtgcgtctaatcattaaagaaacaggagaagttaaagaacaagaagtctttatgggtgatttcccattaatgactgatacaggtacgttcgttatcaatggtgcagaacgtgtaatcgtatctcaattagttcgttcaccatccgtttatttcaatgaaaaaatcgacaaaaatggtcgtgaaaactatgatgcaacaattattccaaaccgtggtgcatggttagaatatgaaacagatgctaaagatgttgtatacgtacgtattgatagaacacgtaaactaccattaacagtattgttacgtgcattaggtttctcaagcgaccaagaaattgttgaccttttaggtgacaatgaatatttacgtaatactttagagaaagacggcactgaaaacactgaacaagcgttattagaaatctatgaacgtttacgtccaggtgaaccaccaactgttgaaaatgctaaaagtctattgtattcacgtttctttgatccaaaacgctatgacttagcaagcgtgggtcgttataaaacaaacaaaaaattacatttaaaacatcgtttatttaatcaaaaattagctgagccaattgtaaatactgaaactggtgaaattgtagtagaagaaggtacagtgcttgatcgtcgtaaaatcgacgaaatcatggatgtacttgaatcaaatgcaaacagcgaagtgtttgaattgcatggtagcgttatagacgagccagtagaaattcaatcaattaaagtatatgttcctaacgatgatgaaggtcgtacgacaactgtaattggtaatgctttccctgactcagaagttaaatgcattacaccagcagatatcattgcttcaatgagttacttctttaacttattaagcggtattggatatacagatgatattgaccatttaggtaaccgtcgtttacgttctgtaggtgaattactacaaaaccaattccgtatcggtttatcaagaatggaaagagttgtacgtgaaagaatgtcaattcaagatactgagtctatcacacctcaacaattaattaatattcgacctgttattgcatctattaaagaattctttggtagctctcaattatcacaattcatggaccaagcaaacccattagctgagttaacgcataaacgtcgtctatcagcattaggacctggtggtttaacacgtgaacgtgctcaaatggaagtacgtgacgttcactactctcactatggccgtatgtgtccaattgaaacacctgagggaccaaacattggattgattaactcattatcaagttatgcacgtgtaaatgaattcggctttattgaaacaccatatcgtaaagttgatttagatacacatgctatcactgatcaaattgactatttaacagctgacgaagaagatagctatgttgtagcacaagcaaactctaaattagatgaaaatggtcgtttcatggatgatgaagttgtatgtcgtttccgtggtaacaatacagttatggctaaagaaaaaatggattatatggatgtatcgccgaagcaagttgtttcagcagcgacagcatgtattccattcttagaaaatgatgactcaaaccgtgcattgatgggtgcgaacatgcaacgtcaagcagtgcctttgatgaatccagaagcaccatttgttggtacaggtatggaacacgttgcagcacgtgattctggtgcggctattacagctaagcacagaggtcgtgttgaacatgttgaatctaatgaaattcttgttcgtcgtctagttgaagagaacggcgttgagcatgaaggtgaattagatcgctatccattagctaaatttaaacgttcaaactcaggtacatgttacaaccaacgtccaatcgttgcagttggagatgttgttgagtataacgagattttagcagatggaccatctatggaattaggagaaatggcattaggtagaaacgtagtagttggtttcatgacttgggacggttacaactatgaggatgccgttatcatgagtgaaagacttgtgaaagatgacgtgtatacttctattcatattgaagagtatgaatcagaagcacgtgatactaagttaggacctgaagaaatcacaagagatattcctaatgtttctgaaagtgcacttaagaacttagacgatcgtggtatcgtttatattggtgcagaagtaaaagatggagatattttagttggtaaagtaacgcctaaaggtgtaactgagttaactgccgaagaaagattgttacatgcaatctttggtgaaaaagcacgtgaagttagagatacttcattacgtgtacctcacggcgctggcggtatcgttcttgatgtaaaagtattcaatcgtgaagaaggcgacgatacattatcacctggtgtaaaccaattagtacgtgtatatatcgttcaaaaacgtaaaattcatgttggtgataagatgtgtggtcgacatggtaacaaaggtgtcatttctaagattgttcctgaagaagatatgccttacttaccagatggacgtccgatcgatatcatgttaaatcctcttggtgtaccatctcgtatgaacatcggacaagtattagagctacacttaggtatggctgctaaaaatcttggtattcacgttgcatcaccagtatttgacggtgcaaacgatgacgatgtatggtcaacaattgaagaagctggtatggctcgtgatggtaaaactgtactttatgatggacgtacaggtgaaccattcgataaccgtatttcagtaggtgtaatgtacatgttgaaacttgcgcacatggttgatgataaattacatgcgcgttcaacaggaccatattcacttgttacacaacaaccacttggcggtaaagcgcaattcggtggacaacgttttggtgagatggaggtatgggcacttgaagcatatggtgctgcatacacattacaagaaatcttaacttacaaatccgatgatacagtaggacgtgtgaaaacatacgaggctattgttaaaggtgaaaacatctctagaccaagtgttccagaatcattccgagtattgatgaaagaattacaaagtttaggtttagatgtaaaagttatggatgagcaagataatgaaatcgaaatgacagacgttgatgacgatgatgttgtagaacgcaaagtagatttacaacaaaatgatgctcctgaaacacaaaaagaagttactgattaatacgcaatttacaaaacaggcaaaaagatactaagctgaattttattgatgattcagtttagtactttaagccattttaaataaatgcaaatcaatcaaatagcacagctaatctaaattgaaggaggtaggctccttgattgatgtaaataatttccattatatgaaaataggattggcttcacctgaaaaaatccgttcttggtcttttggtgaagttaaaaaacctgaaacaatcaactaccgtacattaaaacctgaaaaagatggtctattctgtgaaagaattttcggacctacaaaagactgggaatgtagttgtggtaaatacaaacgtgttcgctacaaaggcatggtctgtgacagatgtggagttgaagtaactaaatctaaagtacgtcgtgaaagaatgggtcacattgaacttgctgctccagtttctcacatttggtatttcaaaggtataccaagtcgtatgggattattacttgacatgtcaccaagagcattagaagaagttatttactttgcttcttatgttgttgtagatccaggtccaactggtttagaaaagaaaactttattatctgaagctgaattcagagattattatgataaatacccaggtcaattcgttgcaaaaatgggtgcagaaggtattaaagatttacttgaagagattgatcttgacgaagaacttaaattgttacgcgatgagttggaatcagctactggtcaaagacttactcgtgcaattaaacgtttagaagttgttgaatcattccgtaattcaggtaacaaaccttcatggatgattttagatgtacttccaatcatcccaccagaaattcgtccaatggttcaattagatggtggacgatttgcaacaagtgacttaaacgacttataccgtcgtgtaattaatcgaaataatcgtttgaaacgtttattagatttaggtgcacctggtatcatcgttcaaaacgaaaaacgtatgttacaagaagccgttgacgctttaattgataatggtcgtcgtggtcgtccagttactggcccaggtaaccgtccattaaaatctttatctcatatgttaaaaggtaaacaaggtcgtttccgtcaaaacttacttggtaaacgtgttgactattcaggacgttcagttattgcagtaggtccaagcttgaaaatgtaccaatgtggtttaccaaaagaaatggcacttgaactatttaaaccattcgtaatgaaagaattagttcaacgtgaaattgcaactaacattaaaaatgcgaagagtaaaatcgaacgtatggatgatgaagtttgggacgtattggaagaagtaattagagaacatcctgtattacttaaccgtgcaccaacacttcatagacttggtattcaagcatttgaaccaactttagttgaaggtcgtgcgattcgtctacatccacttgtaacaacagcttataacgctgactttgacggtgaccaaatggcggttcacgttcctttatcaaaagaggcacaagctgaagcaagaatgttgatgttagcagcacaaaacatcttgaaccctaaagatggtaaacctgtagttacaccatcacaagatatggtacttggtaactattaccttactttagaaagaaaagatgcagtaaatacaggcgcaatctttaataatacaaatgaagtattaaaagcatatgcaaatggctttgtacatttacacactagaattggtgtacatgcaagttcgttcaataatccaacatttactgaagaacaaaacaaaaagattcttgctacgtcagtaggtaaaattatattcaatgaaatcattccagattcatttgcttatattaatgaacctacgcaagaaaacttagaaagaaagacaccaaacagatatttcatcgatcctacaactttaggtgaaggtggattaaaagaatactttgaaaatgaagaattaattgaacctttcaacaaaaaattcttaggtaatattattgcagaagtattcaacagatttagcatcactgatacatcaatgatgttagaccgtatgaaagacttaggattcaaattctcatctaaagctggtattacagtaggtgttgctgatatcgtagtattacctgataagcaacaaatacttgatgagcatgaaaaattagtcgacagaattacaaaacaattcaaccgtggtttaatcactgaagaagaaagatataatgcagttgttgaaatttggacagatgcaaaagatcaaattcaaggtgaattgatgcaatcacttgataaaactaacccaatcttcatgatgagtgattcaggtgcccgtggtaacgcatctaactttacacagttagcaggtatgcgtggattgatggccgcaccatctggtaagattatcgaattaccaatcacatcttcattccgtgaaggtttaacagtacttgaatacttcatctcaactcacggtgcacgtaaaggtcttgccgatacagcacttaaaacagctgactcaggatatcttactcgtcgtcttgttgacgtggcacaagatgttattgttcgtgaagaagactgtggtactgatagaggtttattagtttctgatattaaagaaggtacagaaatgattgaaccatttatcgaacgtattgaaggtcgttattctaaagaaacaattcgtcatcctgaaactgatgaaataatcattcgtcctgatgaattaattacacctgaaattgctaagaaaattacagatgctggtattgaacaaatgtatattcgctcagcatttacttgtaacgcacgacatggtgtttgtgaaaaatgttacggtaaaaaccttgctactggtgaaaaagttgaagttggtgaagcagttggtacaattgcagcccaatctatcggtgaaccaggtacacagcttacaatgcgtacattccatacaggtggggtagcaggtagcgatatcacacaaggtcttcctcgtattcaagagattttcgaagcacgtaaccctaaaggtcaagcggtaattacggaaatcgaaggtgtcgtagaagatattaaattagcaaaagatagacaacaagaaattgttgttaaaggtgctaatgaaacaagatcataccttgcttcaggtacttcaagaattattgtagaaatcggtcaaccagttcaacgtggtgaagtattaactgaaggttctattgaacctaagaattacttatctgttgctggattaaacgcgactgaaagctacttattaaaagaagtacaaaaagtttaccgtatgcaaggtgtagaaatcgacgataaacacgttgaggttatggttcgacaaatgttacgtaaagttagaattatcgaagcaggtgatacgaagttattaccaggttcattagttgatattcataactttacagatgcaaatagagaagcatttaaacaccgtaagcgtcctgcaacagctaaaccagtattacttggtattactaaagcatcacttgaaacagaaagtttcttatctgcagcatcattccaagaaacaacaagagttcttacagatgcagcaattaaaggtaagcgtgatgacttattaggtcttaaagaaaacgtaattattggtaagttaattccagctggtactggtatgagacgttatagcgacgtaaaatacgaaaaaacagctaaaccagttgcagaagttgaatctcaaactgaagtaacggaataacaagtatataacagaggctaatgctttagcctcttgttatttttatgtaaattatttgatttaatgttgacgaattctcttgttcaatgttaatatattaaaggttgatgcaagcagaactttggaggataaattattgtctaaggaaaaagttgcacgctttaacaaacaacattttgtagttggtcttaaagaaacgcttaaagcgttaaagaaagatcaagttacatctttgattattgctgaagacgttgaagtatatttaatgactcgcgtgttaagccaaatcaatcagaaaaatatacctgtatcttttttcaaaagcaaacatgctttgggtaaacatgtaggtattaacgtcaatgcgacaatagtagcattgattaaatgagaattagtaagtgttttacttactaaattttatttaacctaaaaatgaaccacctggatgtgtgggattaaaaagtgaagagaggaggacatatcacatgccaactattaaccaattagtacgtaaaccaagacaaagcaaaatcaaaaaatcagattctccagctttaaataaaggtttcaacagtaaaaagaaaaaatttactgacttaaactcaccacaaaaacgtggtgtatgtactcgtgtaggtacaatgacacctaaaaaacctaactcagcgttacgtaaatatgcacgtgtgcgtttatcaaacaacatcgaaattaacgcatacatccctggtatcggacataacttacaagaacacagtgttgtacttgtacgtggtggacgtgtaaaagacttaccaggtgtgcgttaccatattgtacgtggagcacttgatacttcaggtgttgacggacgtagacaaggtcgttcattatacggaactaagaaacctaaaaactaagaatttagtttttaattaaatcttaaacttaaaatatttaatataaggaagggaggatttacattatgcctcgtaaaggatcagtacctaaaagagacgtattaccagatccaattcataactctaagttagtaactaaattaattaacaaaattatgttagatggtaaacgtggaacagcacaaagaattctttattcagcattcgacctagttgaacaacgcagtggtcgtgatgcattagaagtattcgaagaagcaatcaacaacattatgccagtattagaagttaaagctcgtcgcgtaggtggttctaactatcaagtaccagtagaagttcgtccagagcgtcgtactactttaggtttacgttggttagttaactatgcacgtcttcgtggtgaaaaaacgatggaagatcgtttagctaacgaaattttagatgcagcaaataatacaggtggtgccgttaagaaacgtgaggacactcacaaaatggctgaagcaaacaaagcatttgctcactaccgttggtaagataaaagcttttaccctgagtgtgttctatattaatgaattttcattaagcgttcatgcttagggcatcgccatatctatcgtatttattcagtaatataaactggaaggagaaaaaatacatggctagagaattttcattagaaaaaactcgtaatatcggtatcatggctcacattgatgctggtaaaacgactacgactgaacgtattctttattacactggccgtatccacaaaattggtgaaacacacgaaggtgcttcacaaatggactggatggagcaagaacaagaccgtggtattactatcacatctgctgcaacaacagcagcttgggaaggtcaccgtgtaaacattatcgatacacctggacacgtagacttcactatagaagttgaacgttcattacgtgtacttgacggagcagttacagtacttgatgcacaatcaggtgttgaacctcaaactgaaacagtttggcgtcaggctacaacttatggtgttccacgtatcgtatttgtaaacaaaatggacaaattaggtgctaacttcgaatactctgtaagtacattacatgatcgtttacaagctaacgctgctccaatccaattaccaattggtgcggaagacgaattcgaagcaatcattgacttagttgaaatgaaatgtttcaaatatacaaatgatttaggtactgaaattgaagaaattgaaattcctgaagaccacttagatagagctgaagaagctcgtgctagcttaatcgaagcagttgcagaaactagcgacgaattaatggaaaaatatcttggtgacgaagaaatttcagtttctgaattaaaagaagctatccgccaagctactactaacgtagaattctacccagtactttgtggtacagctttcaaaaacaaaggtgttcaattaatgcttgacgctgtaattgattacttaccttcaccactagacgttaaaccaattattggtcaccgtgctagcaaccctgaagaagaagtaatcgcgaaagcagacgattcagctgaattcgctgcattagcgttcaaagttatgactgacccttatgttggtaaattaacattcttccgtgtgtattcaggtacaatgacatctggttcatacgttaagaactctactaaaggtaaacgtgaacgtgtaggtcgtttattacaaatgcacgctaactcacgtcaagaaatcgatactgtatactctggagatatcgctgctgcggtaggtcttaaagatacaggtactggtgatactttatgtggtgagaaaaatgacattatcttggaatcaatggaattcccagagccagttattcacttatcagtagagccaaaatctaaagctgaccaagataaaatgactcaagctttagttaaattacaagaagaagacccaacattccatgcacacactgacgaagaaactggacaagttatcatcggtggtatgggtgagcttcacttagacatcttagtagaccgtatgaagaaagaattcaacgttgaatgtaacgtaggtgctccaatggtttcatatcgtgaaacattcaaatcatctgcacaagttcaaggtaaattctctcgtcaatctggtggtcgtggtcaatacggtgatgttcacattgaattcacaccaaacgaaacaggcgcaggtttcgaattcgaaaacgctatcgttggtggtgtagttcctcgtgaatacattccatcagtagaagctggtcttaaagatgctatggaaaatggtgttttagcaggttatcctttaattgatgttaaagctaaattatatgatggttcataccatgatgtcgattcatctgaaatggccttcaaaattgctgcatcattagcacttaaagaagctgctaaaaaatgtgatcctgtaatcttagaaccaatgatgaaagtaactattgaaatgcctgaagagtacatgggtgatatcatgggtgacgtaacatctcgtcgtggacgtgttgatggtatggaacctcgtggtaatgcacaagttgttaatgcttatgtaccactttcagaaatgttcggttatgcaacatcattacgttcaaacactcaaggtcgcggtacttacactatgtacttcgatcactatgctgaagttccaaaatcaatcgctgaagatattatcaagaaaaataaaggtgaataatataacttgttttgactagctagcctaggttaaaatacaaggtgagcttaaatgtaagctatcatctttatagtttgattttttggggtgaatgcattataaaagaattgtaaaattctttttgcatcgctataaataatttctcatgatggtgagaaactatcatgagagataaatttaaatattatttttaattagaataggagagattttataatggcaaaagaaaaattcgatcgttctaaagaacatgccaatatcggtactatcggtcacgttgaccatggtaaaacaacattaacagcagcaatcgctactgtattagcaaaaaatggtgactcagttgcacaatcatatgacatgattgacaacgctccagaagaaaaagaacgtggtatcacaatcaatacttctcacattgagtaccaaactgacaaacgtcactacgctcacgttgactgcccaggacacgctgactacgttaaaaacatgatcactggtgctgctcaaatggacggcggtatcttagtagtatctgctgctgacggtccaatgccacaaactcgtgaacacattcttttatcacgtaacgttggtgtaccagcattagtagtattcttaaacaaagttgacatggttgacgatgaagaattattagaattagtagaaatggaagttcgtgacttattaagcgaatatgacttcccaggtgacgatgtacctgtaatcgctggttcagcattaaaagctttagaaggcgatgctcaatacgaagaaaaaatcttagaattaatggaagctgtagatacttacattccaactccagaacgtgattctgacaaaccattcatgatgccagttgaggacgtattctcaatcactggtcgtggtactgttgctacaggccgtgttgaacgtggtcaaatcaaagttggtgaagaagttgaaatcatcggtttacatgacacatctaaaacaactgttacaggtgttgaaatgttccgtaaattattagactacgctgaagctggtgacaacattggtgcattattacgtggtgttgctcgtgaagacgtacaacgtggtcaagtattagctgctcctggttcaattacaccacatactgaattcaaagcagaagtatacgtattatcaaaagacgaaggtggacgtcacactccattcttctcaaactatcgtccacaattctatttccgtactactgacgtaactggtgttgttcacttaccagaaggtactgaaatggtaatgcctggtgataacgttgaaatgacagtagaattaatcgctccaatcgcgattgaagacggtactcgtttctcaatccgtgaaggtggacgtactgtaggatcaggcgttgttactgaaatcattaaataatttctaatttcttagattttatataaaaagaagatccctcaatcgaggggtctttttttaatgtgtaaattttgtaatggctattcgatttagaagaacaataattgatgaaagactgactaataaaacttataactgataatactgtttaaataaaattgttgagtcttggacattgtaaaatgctcccttcaaagttttcattttttcaatgtctactttgaagggagcatttcattagtttatgtctcagattcatatctttcaattaatttaaatgcttaatttgttttaaatacttgctctaattctatgatttttaaaaatacagctacagcgtattttaatgatttttcatcaatatcaaatttgggattatggtgtggcgctgtaatacctttactttcattaccacaaccagtcagaaagaatgcacctggtcgtactttcaaataatgtgaaaaatcttctccaatcatcattaaatctgattcattaaagcgtacatgtaagtcatttgttgcttctttaataacttgatatgctttctcgttattatggacaggcaaataccctttaatataattcaaatcatagttaatatcatttgctattgctaaaccttgtagaagcttatccattttgtccattacatgattctgtatatctgaatcgaaagttctaactgtacctttacaaaatgcttgatcaggaataacgctatctgtggtgcctgcttgaatcattccaaatgaaagtacagcttgtttaactggatcgatcgtacgtgaaattattttttgtgcacttaaaatgaactctgccatgattactattgggtcaatggtttcatgaggtttggcaccatgaccaccacgacctttaaatgtgacgctaaattcatctggagaggccatgattgcccccgcacgtgaatgaatagttccagtaggataaccactccataaatgtgtaccgtaaattctatctacattttccagacatccagcatctatcatttcttgagaaccacctggcatgatttcttcaccgtactggaatattaatacaacattaccttctaataaatgtttatgttcatctaaaatctctgctacagtaagtaaaattgctgtatgaccatcatgcccacacgcatgcatacatcctggatttttagacttataaggcacatcgtttaattcctcgacaggtaacgcatcaaagtcagctcttaatgcaatggtaggtcctgtgcccaagcctttaaatgtggctttgataccattgcggccgataggagtttcaatatcacaagataactggcttaattggttaacaatataatcatgtgtttgaaattcttcaaaagataactcaggatattggtgtaaataacgtctgagttgaattgttttattttctttattatttgctagttggaaccaatctaacacccttatcactactttctaaaataatgtttatagtataacattttatgaaattatcgtactaaatgattgctttgagatattttatctatgaatgataaggctttcaagttatgtagaattactgtatgataaaggtattaccaaacaatacttaagggggattatatactgtggttcaatcattacatgagtttttagaggaaaatataaattatctaaaagaaaatggtttgtataatgaaatagatacaattgaaggtgcaaacggaccagaaatcaaaatcaatgggaaatcatacattaacttatcttcaaataattatttaggactagcaacaaatgaagatttgaaatcagctgcaaaagcagctattgatacacatggtgtaggtgcaggcgctgttcgtacaatcaatggtacattagatttacacgacgaattagaagaaacactagcaaaatttaaaggaacagaagctgcaatagcttatcaatcaggatttaattgtaatatggctgctatttcagctgtcatgaataaaaatgatgctattttatcagatgagcttaatcatgcatcaattattgatggatgtcgcttatctaaagctaaaattattcgagttaaccattcagacatggatgatttacgtgcgaaagcaaaagaagcagttgaatcaggtcaatacaataaagtgatgtatatcactgatggcgtttttagtatggatggtgatgtggctaaattacctgaaattgtagaaattgcagaagaatttggtttattaacttatgttgacgacgctcatggttcaggtgttatgggtaaaggcgctggtacggttaaacattttggtttacaagataaaatcgatttccaaataggtacgctttctaaagcaattggtgtcgttggcggttatgtagcaggtacaaaagagttaatagattggttaaaagcacaatcacgaccattcttattctctacatcattagcacctggggataccaaagcaataactgaagcagttaaaaagttaatggattcaactgaattacatgataaattatggaacaatgcacaatatttaaaaaatggattgtcaaaattaggatatgatacaggtgagtcagaaactccaattacaccagtaattattggtgatgaaaaaacaactcaagaatttagtaagcgtttaaaagacgaaggtgtctatgtgaaatctatcgttttcccaacagtaccaagaggtacaggacgtgtaagaaatatgcctacagctgcacatacaaaagacatgttagatgaagcaattgcggcttatgaaaaagtaggaaaagaaatgaagttgatttaatatttatttattcccacggcaaatattgtcgtgggctttttttaatgtttagtttattaacagtaagttcgtatatcaatgtttagtgctccccaaaattgaagtttgaattttaaaagcatcttgtagaatttagttgtatttttttcaaagaaattcattttgattatttttgataatgagcattttaatagtaatacatgtttatagtgtgtagtatatgtctatactagtagtaactatatagagaaagtaggaataaactatgtcacaagatgtaaatgaattaagtaagcaaccaacgccagataaagcagaagataacgcatttttcccatcaccatattcccttagtcaatatacagcacctaaaacagattttgatggtgttgaacacaaaggtgcctataaagatggtaaatggaaagtattgatgattgctgctgaagagcgatatgtattattggaaaatggaaaaatgttctctacgggtaatcatcctgttgaaatgttattacctttacatcatttaatggaagcaggttttgacgttgatgttgcgacattatctggttatccagttaaattagaattatgggctatgccaactgaagacgaggcagttataagtacttataataaattgaaagaaaaattaaaacagccaaaaaaattagcagatgtgattaaaaatgaattaggatctgattcagactatttatctgtctttatcccaggcggacatgctgcagttgttggtatttctgaaagtgaggacgttcaacaaacattagattgggcattagacaatgaccgctttatagttacattatgtcatggaccagcagcactactttcagcagggcttaacagagaaaaatctccattagaaggatactctgtttgtgtcttccctgactcattagatgaaggtgcaaatattgaaataggttatttacctggacgcttgaaatggttagttgctgatttattaactaaacaaggattaaaagtagttaacgacgatatgacaggaagaacgttaaaagatcgtaaattattaacaggtgacagtcctttagcttcaaatgagttaggaaaattagcagttaatgaaatgttaaatgcaatacaaaataaataattaaatattaattagaggagcctcatatgtaaatgtatgagggctcttttttttggcaaaatttaagtgatacttgtaaaatagaacctattatgagtatgatttaagaaaacgcttgcaaaactaataaccgcaactagcgatatggaggaaacatgatgtcttatagcattggaattgattatggaactgcttcaggccgtgtgtttttaattaatacaactaacggtcaagtagtatcaaaatttgtgaaaccatatacacatggtgtcattgagagtgaattaaatggtttgaaaataccacatacatatgcacttcaaaatagtaatgattatttagaaattatggaagaaggaatatcatatatagtacgtgaatcaaaaatagatccagacaatatagtaggtattggtatagactttacttcatctactattatttttactgacgaaaaccttaacccggtacataacttaaaacaatttaaaaacaatccacatgcgtatgtgaaactttggaaacatcatggtgcatataaagaggcagagaaattatatcaaactgctattgaaaataataataagtggttaggccattatggatataatgttagtagtgaatggatgattcccaaaataatggaggtcatgaatcgagcaccagaaattatggaaaaaacggcttatattatggaagcgggcgattggattgtaaataaattaactaataaaaatgtacgctcgaattgtggattaggtttcaaagcattttgggaagaagaaacagggtttcattatgatttatttgataaaatagaccccaaattatcaaaagtaattcaagataaagtatctgcaccggttgttaatattggtgaagcagtagggaaactggatgataaaatggcacagaaattaggattatcaaaagaaactatggtaagtccttttattattgatgcccatgctagtttattaggtattgggtctgaaaaagataaagaaatgactatggtgatgggaacaagcacatgccatcttatgttaaatgaaaagcaacatcaagtgccaggtatatcaggttctgtaaaaggagcaattattccagaattatttgcttatgaagcggggcaatcagcagtaggtgatttgtttgagtatgtcgctaagcaagcaccaaagtcatatgtagatgaagcagaaaatagaaatatgactgtatttgaattaatgaatgaaaagataaaacatcaaatgccaggtgaaagtgggctcattgctcttgattggcataatggaaatcgaagtgtattaagtgatagcaatttaacaggttgtatctttggattaactttacaaactaagcatgaggatatttatagagcatatttagaagctacagcatttggtactaagatgattatgcaacagtatcaagattggcatatggaagtagaaaaggtatttgcatgtggcggtatacctaaaaagaatgctgttatgatggatatctatgcgaatgtactgaataaaaaactaattgttatggatagtgagtatgcaccagcaataggcgcagcaatattaggtgcagtcagtggtggcgcacataattcaattaatgacgcagttgatgctatgaaagagccaattttatacgaaattaatccagaagcggaaaaagtacaaaggtatgaaacattatttaaagcttataaggctttacatgatatccatggttataaaaaagctaatataatgaaagatatccagagtttaagagttgagggataaaaaatttaatttgacagtaattagcaataataaacgctataaattactaaaatcaattaatacaactagaatttccatttacagaaatatcagcaacatgtacatgtcatatatacaagaaagcgcttttatattataattattatgaaaatgaatattatgtccgcttgtgatggactatagctatatagaagagacaaaggagatatttctatgaaaaaaattatgattactggtgcattaggacaaattggtacagaattagttgttaagtgcagagaaatttatgggacagataatgttcttgctacagatattagggaacctgaagcagactcacctgtacaaaatggaccatttgaaatcttagacgtaacagatcgtgaccgtatgtttgagttagttagggactttgaagcggatagtctaatgcatatggcagcattattatcagcaactgctgagaaaaatccaattctagcttgggatttaaatatgggtggattaatgaatgcattagaagctgcaagaacttataatttgcactttttcacaccaagttcaattggtgcatttggagactcaactcctaaagttaatacgccacaagtaacgattcagcaacctacgacaatgtatggtgtaaataaagtagctggagaattattgtgtcaatactatttcaaacgttttggtgtagatacaagaagtgttagattcccaggtttaatctcgcatgttaaagagccaggtggcggtactacagactatgctgttgaaatatacttcaaagcagtaagagagggtcattatacaagcttcatagataaaggcacgtatatggatatgatgtatatggatgatgcaattgaagcaattattaaacttatggaagcagacgacgctaaattagaaactagaaatggttataatttgagcgcaatgagttttgatccagagatggtaaaagaagcaattcaagaatactatcccaattttacattagattacgatgttgatcctattagacaaggtatcgctaatagttggccggattctattgatacaagctgttcacgtggcgaatggggatttgatcctaaatatgatttagcgagcatgactaaattaatgttagaagctattgaacaaaaagatactgttaaaaataataactaatcatttccattcactttaatacacggaatgatattttaaattactctttattttaataaactagtgcatgaattctaatattattcattatacttattgaattcgcgagcttagttcattttaaagtaaagagttttttgtatgtaaagtatattagtaaaacacagattacttgtctctgtgaaattaatacgtttatactaaaagatatagtctttctagaaatctgttaattaattttgaatttttagaaaatttgttgaacagcaaaatatggattgttataatttaagttaaacaaattcttatacaatattattaggaggcaatcaccatgtcacaagcagttaaagttgaacgacgagaaacattaaaacaaaaaccaaatacatctcaactaggttttggtaaatattttactgattatatgttgagttatgattatgatgcagataaaggatggcatgatttgaagatagtaccttatggtcctattgaaatttcacctgctgcacaaggtgttcattatggtcaatcggtattcgaaggattaaaagcatataaaagagatggggaagttgcacttttccgtcctgaagaaaattttaagcgtcttaataactcgttagcacgattagaaatgcctcaagtagacgaagcagaattgttagaggggctaaaacaattagttgatattgaaagagattggattcctgaaggggaaggtcaatcattatatattcgtccatttgtttttgcaacagaaggggcacttggcgttggtgcatcacatcagtataaattattaattattttatctccttcaggtgcatattatggtggtgaaactttaaaaccaactaaaatctatgtagaagatgaatatgtgcgtgctgttcgtggcggtgtaggctttgcaaaagttgcaggtaactatgcggcaagtttattagcacaaactaatgcaaataaattaggttatgaccaagtattatggcttgatggtgttgaacagaaatatatcgaagaagttggtagcatgaacattttcttcgttgaaaatggcaaagtaattacaccagagttgaatggcagtattttacctggtattacacgtaaatctattatcgaattagctaaaaacttaggatatgaagtcgaagagcgccgcgtttcaatcgatgaattattcgaatcatatgataaaggtgagttaacagaagtatttggtagtggtactgcagcagttatttcacctgtgggtacattgagatacgaagatcgtgaaatcgttattaataataatgagactggtgaaattactcaaaaattatacgacgtctatactggtattcaaaatggtactttagaagataaaaatggttggagagtcgttgtaccaaaatattaataaaaattgaatataatcatgaaaacaatatgcaaaagttaatcatgactaaaatccctttcaatgaagcgaagcatggtaataaattaagtttacaatgtttattgttaagtattgaaggggatttcacttattattatatttaattcaatatttaaatagaacaatactacgagttcattttcaggggataacgaatatcatagaatcagcataatacgaaataaataaataggagtattgatatcaatggaatggatattatttgataaagatggtacgttaattgaatttgatagaagttgggaaaaaataggggtacgatttgtacaatcattgcttgagactttcccagtacataataaagaagctgctttaagacaactcggtgtcattaaagaatctattgatccaaaatcagtgatgggttcaggatctttacaacaaattatccaggcatttaatgatgtgacgggacaagatacaaccgactggtccaagtcaacaagtcaaaagctggtagatgaacgtattcctgaaattaattgggtagaaggtgttaaagaagcacttatcgatttgaaagcaaaaggctatcaacttggtattgttacgagtgatactaaaaaaggtgtagaacaatttttagcacataccaatgctacctcgttgttcgatttgatcatttctaccgaagcggatgcctatgagaagccaaatcctaaagtattatcgcctttatttgagcaatataatgtagatcctcagaaagtagctatagtaggagacactgctaatgatatgaagacagcaagtaatgcaaatttaggtatggcaataggtgtattaacaggtattgcaacaaaagaagaattacatgaagctgatattattttaaatagtgcggcagatattttagaagctttaaattaaaaagaaagacatagtgtatatgtgaattaatgtattcgatagaattgataaaataatcgataatatctatggaatatacattgaatataaacatatacgctatgtctttagtcttttatcgtgtatctacttgtcgatatgtttgaataattcgagcaattttgtttatcataggatttaaagattcggggtccttatggatatcatattcattaatattgatacgtacaactggacatgcattaaagctattaatccaatcgtcatagcgtttaaatagctttttccagtattcagggtctgtattaatttccatttcgcgaccacgttcaataatacgatcaatgacctcatcatagttacattctaaataaatcattacatcaggtttaggaaaataaggtgtcatgaccatggcattaaataagtctgaatatgttttgaaatcttctttactcattgtgccttcttcttcatgcatttttgcaaaaatatcaacatcttcataaattgatcgatcttggacaaagccaccaccatattcaaacatacgcttttgttctttaaaacgttcagctaagaagtaaatttgcaaatggaaactccatcgttcaaaatcgctgtaaaatttatctaaatatggattatgttcgacattttcaaaagacgttttaaagtttaatttatctgcaagtgcttgcgttagtgttgattttccaacaccaactgtacctgcaatggttataatggcattttgtggaataccgtaattattcattggtaatatctcctatcataggtaatataatatgtaatatatcttcgtaatcttgttcatttttaagaaaatcaatagaagttgtatcgattaaaactacatttgaaccattactttgtaaggactcataatactcacgataatctttttttaactttaacagatattcatcttctatttgatgctcaaaactacggttacgtttagcaattctagattttaacacatcaaggtctgcatctaaaaagataatcatattcggcataatcatatcttcagttaaaatatcataaattttactgaatttctgaaattcaacagaactcaaagtatttttagcaaatatcttatttttatgtatatgataatcactaactacaccttgatttagttgtgttacatcttgaaattgcttatatctattgcataaaaagaacatttcagtttgaaaactccatttagagatatcttcataaaagtctgataaaaatggattttctgtgatgatttctttttcttcataaaaatctaaagtttgacttaatttgtgtgcaagtgaagatttacctacgccaataggaccttcaattgctataaaaggtttgttcatattcacatctccaaatgttaaaatagacattgagtattgtaccataagtgaggtatctggacataaatgacaaatgatatatattttatgacattagcgattgaagaagctaaaaaagcagctcaactaggcgaagtacctataggtgctatcatcactaaagatgatgaagttatcgctagagcacataatttaagagaaacactacaacaaccaacggcgcatgctgaacatattgcaattgaacgtgcagccaaagtgttaggtagttggcgtttagaaggttgcacattatatgtaaccttagaaccatgtgtcatgtgcgcaggaacaattgtaatgagtcgcattccaagagtcgtctatggcgcagatgatcctaaaggtggttgtagtggcagtttaatgaatttattgcaacaatctaattttaatcatcgtgcaattgttgataaaggtgtacttaaagaagcatgtagcacattattaacaacattttttaaaaacttaagagccaataagaaatccaccaattagacgatagtacatactaattaaaatttgttagaattacattatatgataaattaatgacaatataaatgttaatagaaaagtatgtgcgctgagtatatattcttatttaagaacaagattttaaatttacgaaacgaggtaacataatgataaaactaatagccactgatatggatggcacgctacttaatgcagcacatgaaatttctcaacctaatattgatgcgattaaatacgctcaagaacaagggataacggttgttatcgcgacaggtcgagcattttatgaagcacaagcaccagttgctgacacagatttaacagtaccatatatttgtttgaatggtgctgaagtacgtgatgaaactttcaatgtaatgagcacttcacaccttaataaatcgttagtacacaaaattacaaatgttttaaaagatgcaggtatttattatcaagtatacacgagtcgtgcgatttatactgaagatccacaaagagatttagacatttacatagatattgctgagcgtgcaggtcaacatgcaaacgttgagcgtattaaaaatggtattcaaagacgcatagataatggtacgttgaaagttgttgataattatgatgctattgaaaacatacctggtgaattaattatgaaaatattagcatttgatggaaatttagaaaaaattgacaaagctagtaaaattttagctgaatctccgaatttagctatatcatcatcttcgagaggaaatatagaaataacgcattcagatgcacaaaaaggtattgcgctagaaacaattgccgaaagattagggattgaaatgaaagaagtcatgtcaataggtgacaatttaaatgacttatcaatgttagagaaagttggctatccagttgcgatggaaaatggtgcagaagaagttaaaaaaatagcgaaatatgtcacagatacgaatgaaaatagtggtgttggaaaagctattatgaaattattacgtgaacaacaagtttaataaaaaaagaggggtcaaatatgaaaggattaattattattggcagtgcacaagtgaattcacatacaagtgcactagcaagatacttaactgagcattttaaaacacatgatattgaagcggaaatattcgatttagcagaaaaaccgttaaatcaattagatttttcaggaacaacaccgtctattgatgaaatcaaacaaaatatgaaagatttaaaagagaaagcaatggcggcggactttttaatattaggaacgccaaactatcatggttcatattctggaatattgaaaaatgcattagatcatctaaatatggattattttaaaatgaaacctgtaggcttaataggaaatagtggtggtattgttagttcagagccattgtcacatttaagagtaatcgtcagaagtttactaggcattgctgtaccaactcaaatagcaacacatgattctgattttgctaaaaatgaagatggttcatattacttaaatgatagtgaattccaattacgagcaagattatttgtcgatcaaattgtatcttttgtgaataatagtccatatgaacatttaaaataatattaaaaaatatgtaaatatacattaaaaataggtatgtagcttaaggtatttcattgagaatgcttttaagtcacatgcctattttttgttctaatgcaccaatagtaagcctttgatattactgttgtgagcaatgttattaattaaaataagatgtaatagcgaattgaaaacaagcttagattaaaagtgagttttaaaaatatagataaataatttaaagcaattaaagaaaaaagtattaaaaattgcaattcttaaactgtgattcatattaatatttctagcaaataacattgtaaaataaagaaaaataattaaagtattgcactttattgaaatttatattacgatagtaatgcagaaatttatatatgcaaaatattatatttatcaaattttgatattttaaaggagtattattaaatgaataataaaaagacagcaacaaatagaaaaggcatgataccaaatcgattaaacaaattttcgataagaaagtattctgtaggtactgcttcaattttagtagggacaacattgatttttgggttaagtggtcatgaagctaaagcggcagaacatacgaatggagaattaaatcaatcaaaaaatgaaacgacagccccaagtgagaataaaacaactaaaaaagttgatagtcgtcaactaaaagacaatacgcaaactgcaactgcagatcagcctaaagtgacaatgagtgatagtgcaacagttaaagaaactagtagtaacatgcaatcaccacaaaacgctacagctaatcaatctactacaaaaactagcaatgtaacaacaaatgataaatcatcaactacatatagtaatgaaactgataaaagtaatttaacacaagcaaaagatgtttcaactacacctaaaacaacgactattaaaccaagaactttaaatcgcatggcagtgaatactgttgcagctccacaacaaggaacaaatgttaatgataaagtacatttttcaaatattgacattgcgattgataaaggacatgttaatcagactactggtaaaactgaattttgggcaacttcaagtgatgttttaaaattaaaagcaaattacacaatcgatgattctgttaaagagggcgatacatttacttttaaatatggtcaatatttccgtccaggatcagtaagattaccttcacaaactcaaaatttatataatgcccaaggtaatattattgcaaaaggtatttatgatagtacaacaaacacaacaacatatacttttacgaactatgtagatcaatatacaaatgttagaggtagctttgaacaagttgcatttgcgaaacgtaaaaatgcaacaactgataaaacagcttataaaatggaagtaactttaggtaatgatacatatagcgaagaaatcattgtcgattatggtaataaaaaagcacaaccgcttatttcaagtacaaactatattaacaatgaagatttatcgcgtaatatgactgcatatgtaaatcaacctaaaaatacatatactaaacaaacgtttgttactaatttaactggatataaatttaatccaaatgcaaaaaacttcaaaatttacgaagtgacagatcaaaatcaatttgtggatagtttcacccctgatacttcaaaacttaaagatgttactgatcaattcgatgttatttatagtaatgataataaaacagctacagtcgatttaatgaaaggccaaacaagcagcaataaacaatacatcattcaacaagttgcttatccagataatagttcaacagataatggaaaaattgattatactttagacactgacaaaactaaatatagttggtcaaatagttattcaaatgtgaatggctcatcaactgctaatggcgaccaaaagaaatataatctaggtgactatgtatgggaagatacaaataaagatggtaaacaagatgccaatgaaaaagggattaaaggtgtttatgtcattcttaaagatagtaacggtaaagaattagatcgtacgacaacagatgaaaatggtaaatatcagttcactggtttaagcaatggaacttatagtgtagagttttcaacaccagccggttatacaccgacaactgcaaatgtaggtacagatgatgctgtagattctgatggactaactacaacaggtgtcattaaagacgctgacaacatgacattagatagtggattctacaaaacaccaaaatatagtttaggtgattatgtttggtacgacagtaataaagatggtaaacaagattcgactgaaaaaggaattaaaggtgttaaagttactttgcaaaacgaaaaaggcgaagtaattggtacaactgaaacagatgaaaatggtaaataccgctttgataatttagatagtggtaaatacaaagttatctttgaaaaacctgctggcttaactcaaacaggtacaaatacaactgaagatgataaagatgccgatggtggcgaagttgatgtaacaattacggatcatgatgatttcacacttgataatggctactacgaagaagaaacatcagatagcgactcagattcagacagcgattcagactcagatagcgactcagattcagatagcgactcagattcagacagcgattcagacagcgactcagactcagatagcgattcagattcagacagcgactcagactcagacagcgattcagactcggatagcgactcagactcagatagcgactcagattcggatagcgactcagactcagatagcgattcagattcagatagcgattcggactcagacagtgattcagattcagactcagatagcgactcagattctgacagcgattcagactcagacagcgactcagactcagacagtgattcagattcagacagcgactcagattcagatagcgactcagactcagatagcgactcagactcagatagcgactcagactcggatagcgattcagattcagacagcgactcagattcagatagcgattcggactcagacaacgactcagattcagatagcgattcagattcagatgcaggtaaacatactccggctaaaccaatgagtacggttaaagatcagcataaaacagctaaagcattaccagaaacaggtagtgaaaataataattcaaataatggcacattattcggtggattattcgcggcattaggatcattattgttattcggtcgtcgtaaaaaacaaaataaataatatgattaacttaaccaggtccatgtggcctggttttttctgtttagaaattcccagatataaaacaaaaaatctttaaggaatagatacaatttaatttgttacagaaatgtaattgtctatgaattagaaaagctaagatattaatttcaagggcaaataatactattttttatgatgattaaataaagattacaaaactcataaaaacttttatttaaacacaaatgttaaataacgttttacgataaagaaaaataattaaagtattgtgctttatctaaaaatgtaatactatattgatatacatttttgtatttaaaacaattgtattatttaaaaatttgatgaattaggagtaatctaatgctaaacagagaaaataaaacggcaataacaaggaaaggcatggtatccaatcgattaaataaattttcgattagaaagtacacagtgggaacagcatcaattttagtaggtacaacattaatttttggtctggggaaccaagaagcaaaggctgcagaaagtactaataaagaattgaacgaagcgacaacttcagcaagtgataatcaatcgagtgataaagttgatatgcagcaactaaatcaagaagacaatactaaaaatgataatcaaaaagaaatggtatcatctcaaggtaatgaaacgacttcaaatgggaataaattaatagaaaaagaaagtgtacaatctaccactggaaataaagttgaagtttcaactgccaaatcagatgagcaagcttcaccaaaatctacgaatgaagatttaaacactaaacaaactataagtaatcaagaagcgttacaacctgatttgcaagagaataaatcagtggtaaatgttcaaccaactaatgaggaaaacaaaaaggtagatgccaaaactgaatcaactacattaaatgttaaaagtgatgctatcaagagtaatgatgaaactcttgttgataacaatagtaattcaaataatgaaaataatgcagatatcattttgccaaaaagtacagcacctaaacgtttgaatacaagaatgcgtatagcagcagtacagccatcatcaacagaggctaaaaatgttaatgatttaatcacatcaaatacaacattaactgtcgttgatgcagataaaaacaataaaatcgtaccagcccaagattatttatcattaaaatcacaaattacagttgatgacaaagttaaatcaggtgattatttcacaattaaatactcagatacagtacaagtatatggattgaatccggaagatattaaaaatattggtgatattaaagatccaaataatggtgaaacaattgcgactgcaaaacatgatactgcaaataatttaattacatatacatttacagattatgttgatcgatttaattctgtacaaatgggaattaattattcaatttatatggatgctgatacaattcctgttagtaaaaacgatgttgagtttaatgttacgataggtaatactacaacaaaaacaactgctaacattcaatatccagattatgttgtaaatgagaaaaattcaattggatcagcgttcactgaaacagtttcacatgttggaaataaagaaaatccagggtactataaacaaacgatttatgtaaatccatcggaaaattctttaacaaatgccaaactaaaagttcaagcttaccactcaagttatcctaataatatcgggcaaataaataaagatgtaacagatataaaaatatatcaagttcctaaaggttatacattaaataaaggatacgatgtgaatactaaagagcttacagatgtaacaaatcaatacttgcagaaaattacatatggcgacaacaatagcgctgttattgattttggaaatgcagattctgcttatgttgtaatggttaatacaaaattccaatatacaaatagcgaaagcccaacacttgttcaaatggctactttatcttcaacaggtaataaatccgtttctactggcaatgctttaggatttactaataaccaaagtggcggagctggtcaagaagtatataaaattggtaactacgtatgggaagatactaataaaaacggtgttcaagaattaggagaaaaaggcgttggcaatgtaactgtaactgtatttgataataatacaaatacaaaagtaggagaagcagttactaaagaagatgggtcatacttgattccaaacttacctaatggagattaccgtgtagaattttcaaacttaccaaaaggttatgaagtaaccccttcaaaacaaggtaataacgaagaattagattcaaacggcttatcttcagttattacagttaatggcaaagataacttatctgcagacttaggtatttacaaacctaaatacaacttaggtgactatgtctgggaagatacaaataaaaatggtatccaagaccaagatgaaaaaggtatatctggcgtaacggtaacattaaaagatgaaaacggtaacgtgttaaaaacagttacaacagacgctgatggcaaatataaatttactgatttagataatggtaattataaagttgaatttactacaccagaaggctatacaccgactacagtaacatctggtagcgacattgaaaaagactctaatggtttaacaacaacaggtgttattaatggtgctgataacatgacattagatagtggattctacaaaacaccaaaatataatttaggtaattatgtatgggaagatacaaataaagatggtaagcaggattcaactgaaaaaggtatttcaggcgtaacagttacattgaaaaatgaaaacggtgaagttttacaaacaactaaaacagataaagatggtaaatatcaatttactggattagaaaatggaacttataaagttgaattcgaaacaccatcaggttacacaccaacacaagtaggttcaggaactgatgaaggtatagattcaaatggtacatcaacaacaggtgtcattaaagataaagataacgatactattgactctggtttctacaaaccgacttacaacttaggtgactatgtatgggaagatacaaataaaaacggtgttcaagataaagatgaaaagggcatttcaggtgtaacagttacgttaaaagatgaaaacgacaaagttttaaaaacagttacaacagatgaaaatggtaaatatcaattcactgatttaaacaatggaacttataaagttgaattcgagacaccatcaggttatacaccaacttcagtaacttctggaaatgatactgaaaaagattctaatggtttaacaacaacaggtgtcattaaagatgcagataacatgacattagacagtggtttctataaaacaccaaaatatagtttaggtgattatgtttggtacgacagtaataaagacggcaaacaagattcaactgaaaaaggtatcaaagatgttaaagttactttattaaatgaaaaaggcgaagtaattggaacaactaaaacagatgaaaatggtaaatactgctttgataatttagatagcggtaaatacaaagttatttttgaaaagcctgctggcttaacacaaacaggtacaaatacaactgaagatgataaagatgcagatggtggcgaagttgacgtaacaattacggatcatgatgatttcacacttgataatggctactacgaagaagaaacatcagatagcgactcagattcggacagcgactcagattcagacagagactcagactcagatagtgattcagactcggatagcgattcagattcagacagcgattcagattcagatagcgattcagattcagacagagactcagatagtgattcagactcagatagcgactcagattcagacagcgactcagactcagacagcgactcagactcagatagtgactcagattcagatagcgactcagattcggacagcgattcagactcagatagcgactcagattcagatagcgattcggactcagatagcgactcagattcagatagtgattcagactcagatagcgactcagattcagacagcgactcagattcggatagcgactcagattcagacagcgactcagactcggatagtgattcagactcagatagcgactcagactcagacagcgattcagactcagacagcgactcagactcagatgcaggtaagcacacacctgttaaaccaatgagtactactaaagaccatcacaataaagcaaaagcattaccagaaacaggtaatgaaaatagcggctcaaataacgcaacgttatttggcggattattcgcagcattaggatcattattgttattcggtcgtcgtaaaaaacaaaataaataatacagcttataccaggtccgtgaggcctggttttttatttcaaaatttatgaaatgtatcttatgtttgagattaaatagtgcaattttttaaaaaatataacataaatcaacataaatttaattcatctttacattaaaagtacaaacgaataagaaaagcaattaaacacagtatcaaaccatttaaaacaattgatataaaaaacaaacgaataattaaaaagtactagaattaatttattcaaaccaaagtgtaaaataacagtcttagataaataaatttatttaaagtattgtgctttatctaaaaatgtattacgatgggaatacaaatttttatatgtaaaaatattaattttttgcaaatattgatattttaaaggagatttatatgattaacagggataataaaaaggcaataacaaaaaagggtatgatttcaaatcgcttaaacaaattttcgattagaaagtatactgtaggaactgcatcgattttagtaggtacgacattgatttttggtctagggaaccaagaagctaaagctgctgaaaacactagtacagaaaatgcaaaacaagatgatgcaacgactagtgataataaagaagtagtgtcggaaactgaaaataattcgacaacagaaaataattcaacaaatccaattaagaaagaaacaaatactgattcacaaccagaagctaaaaaagaatcaacttcatcaagtactcaaaaacagcaaaataacgttacagctacaactgaaactaagcctcaaaacattgaaaaagaaaatgttaaaccttcaactgataaaactgcgacagaagatacatctgttattttagaagagaagaaagcaccaaataatacaaataacgatgtaactacaaaaccatctacaagtgaaccatctacaagtgaaattcaaacaaaaccaactacacctcaagaatctacaaatattgaaaattcacaaccgcaaccaacgccttcaaaagtagacaatcaagttacagatgcaactaatccaaaagaaccagtaaatgtgtcaaaagaagaacttaaaaataatcctgagaaattaaaagaattggttagaaatgatagcaatacagatcattcaactaaaccagttgctacagctccaacaagtgttgcaccaaaacgtgtaaacgcaaaaatgcgctttgcagttgcacaaccagcagcagttgcttcaaacaatgtaaatgatttaattaaagtgacgaagcaaacaatcaaagttggcgatggtaaagataatgtggcagcagcgcatgacggtaaagatattgaatatgatacagagtttacaattgacaataaagtcaaaaaaggcgatacaatgacgattaattatgataagaatgtaattccttcggatttaacagataaaaatgatcctatcgatattactgatccatcaggagaggtcattgctaaaggaacatttgataaagcaactaagcaaatcacatatacatttacagactatgtagataaatatgaagatataaaatcacgcttaactctatattcgtatattgataaaaaaacagttccaaatgagacaagtttgaatttaacatttgctacagcaggtaaagaaacaagccaaaatgtcactgttgattatcaagatccaatggtccatggtgattcaaacattcaatctatctttacaaaattagatgaagataagcaaactattgaacaacaaatttatgttaacccattgaaaaaatcagcaaccaacactaaagttgatatagctggtagtcaagtagatgattatggaaatattaaactaggaaatggtagcaccattattgaccaaaatacagaaataaaggtttataaagttaactctgatcaacaattgcctcaaagtaatagaatctatgattttagtcaatacgaagatgtaacaagtcaatttgataataaaaaatcatttagtaataatgtagcaacattggattttggtgatattaattcagcctatattatcaaagttgttagtaaatatacacctacatcagatggcgaactagatattgcccaaggtactagtatgagaacaactgataaatatggttattataattatgcaggatattcaaacttcatcgtaacttctaatgacactggcggtggcgacggtactgttaaacctgaagaaaagttatacaaaattggtgactatgtatgggaagacgttgataaagacggtgttcaaggtacagattcaaaagaaaaaccaatggcaaacgttttagttacattaacttacccggacggtactacaaaatcagtaagaacagatgctaatggtcattatgaattcggtggtttgaaagacggagaaacttatacagttaaattcgaaacgccaactggatatcttccaacaaaagtaaatggaacaactgatggtgaaaaagactcaaatggtagttcggttactgttaaaattaatggtaaagatgatatgtctttagatactggtttttacaaagaacctaaatacaacttaggtgactatgtatgggaagatactaataaagatggtatccaagatgcaaatgagccaggaatcaaagatgttaaggttacattaaaagatagtactggaaaagttattggtacaactactactgatgcctcgggtaaatataaatttacagatttagataatggtaactatacagtagaatttgaaacaccagcaggttacacgccaacggttaaaaatactacagctgatgataaagattctaatggtttaacaacaacaggtgtcattaaagatgcagataatatgacattagacagtggtttctataaaacaccaaaatacagtttaggtgattatgtttggtacgacagtaataaagacggcaaacaagattcaactgaaaaaggtatcaaagatgtgacagttacattgcaaaacgaaaaaggcgaagtaattggaacaactaaaacagatgaaaatggtaaatatcgtttcgataatttagatagcggtaaatacaaagttatttttgaaaagcctgctggcttaacacaaacagttacaaatacaactgaagatgataaagatgcagatggtggcgaagttgacgtaacaattacggatcatgatgatttcacacttgataacggatacttcgaagaagatacatcagacagcgattcagactcagatagtgactcagacagcgactcagactcagacagcgactcagactcagacagtgattcagattcagacagcgactcagattcagatagcgactcagattcggacagcgattcagactcagatagcgactcagattcagatagcgattcagactcagacagcgactcagattcagatagcgattcggactcagacagcgattcagactcagatagcgactcagactcagacagcgactcagattcagatagcgattcggactcagatagcgactcagattcagacagcgattcagactcagatagcgactcagactcagacagtgattcagattcagacagcgactcagactcagatagcgactcagactcagacagtgattcagacagcgattcagactcggatgcaggaaaacatacacctgttaaaccaatgagtactactaaagaccatcacaataaagcaaaagcattaccagaaacaggtagtgaaaataacggctcaaataacgcaacgttatttggtggattatttgcagcattaggttcattattgttattcggtcgtcgcaaaaaacaaaacaaataatacaatatgacccaggtccttgtggcctggtttttttataattacacatgcaatagatgtatttttcatataaaataaacaataaagatacggaataaaacttatatgaggcgataatatgaattacattttaggaacaattttagaaagtaaaattacaggtgtagaaaaagcgcaaataaatagattgaagttgttcaaacaacacggcatatcttcaaaatgtgtatatgttaaatggaatccttattcatacacatatgcgaagcaacatcagattgaaaatgatgtatttacaatgtatgactattttcaaaaagcaatcaattataaaaagacaaagcaagttaactggatacagtattgggaaaagtcatgtaggtacacattgaaatttgtggaaaattcaaatgatgtcagaatatatgatgaagagcaatttgtaatgtatgctcattttttagataaacagtatcatcaattaaattatgtgaattattttgatcataaaagaagaaaagtaaaacgcgaattgtatgatggaagaggctttttaagttgttctcgaattttaggtgaaggacaacggattgtactcgaaaattactatacacctaatggggaaatcgtcatccaaaaatattttgacgatataaaagggaaaaacacgctcacaaaggttatcttaaatgaagaccagcatcaacaattttttgatacagaagatgaattagttcaatattttctccatcaattatgtaaaaataatgatcaaatcatattagatcgtcctcatgaattaggaaatgttatagcgggattaaatcaaagtattccagttattgttgtactccatagtacacatttatccggtgccggtaatggtataaaaagtttttataaaacagtgtttaataatttaacacgttataaagcgattgttgtatcaacagaaaagcaatgccaagatatttcacaatatattgaaaataaaataccagttatcaatattccggttggctacgtggcaaatttaaagtatcaatttgacatcaatcaaaaggagaaaaatcatatcatatcaattgctcgcctcgttgaaaataaacaaattaaacatcaaattgaagtaatcaagcaattagtaacaaaacatcccaatattcaattgaatatttatggacatggaaatggtttgtcagaatatcgacaacttgtagaagattatcatttatcggaacatgttaaatttcatggttttaagacgcatattaatgaagagattgctaaagcagaactgatgttatcgacaagtaaaatggaaggttttggcttagcaattttagagtcgctttcagtaggtacaccagtgatcagttatgatgtagattatggtccatcagaactgattcaagatggatttaatggctatttagtacctcaaggtgacatcaatcaaatggttgaaaaggtcgaccaattactaaataatactcaaaaattgcaacagttttcaattaatagcatagaatctgcacaacagtacaatgcaactactatcagtacaaagtggcaaaatattttaaactaagtcaaaagaaaaaagcattttcctagaatcatctatttaacaaacctcgttcatacgaacttacatgtttagttaaatgacataggaaaatgctatttttgtaaaaataaaggtaaagtacatttatataagacgaacaaattggtcccattgtttaattaacgacgctttactatattgttgtgcttttgccaaactaccttttgacagtcgttgctgtacttcaggatgatcaatcacatattttactttatcaaatagggcatcttcatcatttttagtaattaaataaccattgaaatctgaagtaatcagttcgttaggtccatatttaatatcataactaataactggaacaccatgtgctaaagattcaagtagcgctaaagagaaaccttccatgttacttgttattaaactcaaataggcatcgctatattcttggtctagattgcttaaaaagccgcgtaagtaaacatgattttccaatccatatttttgtatcaattcatttaattttttactttcagaaccaaaaccatacatatgaagctctatttttgggacatacgatactaagcgtttaattaattcaatttgttgatgtaattgtttttcaggtgaataacgagcaacggaaattaatttaacactgcgctgatctaatgtttggactggtgtatcaattgtttcactatagccgacaggaatattaacaactggaatagtatggttaatacgtttttcaacatctaatttttgctgctcagtagaaacgataattgcacgatatcgagataaattttcaaacatcgctttatatacatttttaaatggcgatgaatctaatgcatcaatatttttaatgtgtgtactgtgaagcacagctactactgggattgactcaggcgttaagttgaaaataggtgctgtgtacacattacgatcactgaaaaataaatccccatgttgatatagttgtttaatgaaaaatgcgcctaattccgtttcattattaaagaaatattgtttgttagcatagtaaacaataattttttgtacttctggtttgccatccttgtaagaaaaatacttttctaattttgtgtcaccttctggattatagaaaaattcacataatgtttgttgtttatcaacaagaatcctactacaacttaaaaagccacgcacatcataaaaatcacgttttacttttcgtctttgactatcaaaatgatttacataatctaatatacgatatttaggatcttgaaaatgggcatacattaagaaacgctcttgatcatatattctaaagtcatgactattttcaacatgttttaaagtataatgacattcatcagtccaatacgacaaccagtcaaatggttcattgcgttctaaatatgttgcttcttggaagaaatcatacatattaatatagtcagaactagtaatataattttgggcatttctatataaatatctattccatgacagaaatacacattgcgctggtcttcccatttctttaaataaatttaaacgattaataattgctttctctatcccagttaaattaacacctaaactattacctacaaaataattcatttacaacaccacttatatctattttttataattatatcacataatatttaattacttcttttaactggaagatgtgtttatttataaaacaacaaattttgatatttataatgatagtagttattcaatcaactacgaccaatatatcattgtagagcttaggatattgatttatgactcaggcacatcaaatgagaagatttataaaagagatatacaactctagaaggtataataaaaacgcgcaactaatgttacgcgtttgaattaatcatatgatattatttgcgatactttaatttagcgaaagcatcatgttgatggatagactcttcattacgacattcgatatcgaaaccgtctaaccaatcaaattcaactaagtccgcggcaattaaacgaattaagtcttcgacaaaacgtggattttcatatgcacgctctgtcacacgtttttcatcaggacgttttaaaatagggtatagaattgaacttgcattagcttccattgcatctaaaattttatttttatagtcatcaactatgtcttgatctttattaatatatgttttaacagtgacaacaccacgttggttgtgcgctgaatactcacttatttcttttgaacaagggcatagcgttgtgacagttgcttcaatagtaagttctttacgtgtaactttatcaccgtcaattgctaatccataagtgacatcggcattaccaactgctttaatatttgtggttggactatagcgatcaaagaaccatttcccagaaacatcaacgcctgccgcattttgtttcatattcgtttgtaaagtgcgtaacacctgataaagtgtattaaattcaagttcaataccattatcatagtgcttttcaacactttcgattatacggctcatattaatacctttttcgtcttttgttaaacttgttgaaaaactaaatgtgccagctgtttgatactggtcaacaagtacagggtacactaagtttttaataccaacttcttctatttcaaataaaaaatctttatgtgtactttgtaaatctgtcatttcgttcttagtagtaggtttcgtgccttcaataggatctacggaaccaaagtgtttccaacgaccttctcgtgtcgataaatcaaattcagtcatttttttcctccgttaagatttaaagtgatatgtccaatatggttcgactgttaaaaagctgtgttgtttaccatcgatttcaggacttgctaattgttttaaaaatggacctgtttgagaagcatgtgcttcaaatgccttaattttaagttctttaaaatctgtaatatcattttgaatatcaggttctccaagagcttcggttgcatcattactgaacgcaactaaagttaaacgagggcgttcttctttaggcatgcgttcaaccgttcgaattacagcgtctgctgttgcttcgtgatcaggatgtactgcatatccaggataaaatgaaataatcaatgatggatttgtatcatcgattaaagatttaatcataccatctatatgttcatagggttcaaattcgacagttttgtcacgtaaacccatttttcttaaatcagtaataccgataactttacaagcttcttctagttcacgctcacgaatacttggtaatgattcgcgtgttgcaaatgggggattacctaaatttctgcccatttgtcctagggttaaacatgcatatgttacaggtatgcctttttggatataatttgctaatgtgcctgcagatgagaaggtttcatcatcaggatgtggaaatattactaatacatgtctttcgtcagtcatgttgatgcctcctctataaattaaatggtcgctcactaatttgaagtgctgcagcgagttgaccttcgtaattaaaacctgcaattaaaaattcatcatgctcattgacctcaaaatgcgttagaccttgtacataaacccaaccaccatttgatagtttaagaccaatgcgataaggttctttattaccaccttttagttgtgcatgcgtatatgttatttgtatgtttcttaaaaaagtaccagcattaaaaacacgttgatcgaaatggttcgcataggccccatttgtcgtttcaacatgcagatacacaggtttatgttcaaaagaagcaagtaaatctataacttcttgttctttaattggttccaacacgttcactccttacactatcaatgtgtttatctttctattttactaaaaactattcgataattgtatacgattgctcaattatttataaattaattttcatgaagggtaattactcaggattacgtaatcatacagcattagttttttacttttaaaaatcaaaaatttgttggaatttgaaaagtgttaaacattaaaaatgatgctatattaatggtgtatgaatgaattcataagtttttaaaatgtattaaatttgtggaggcatgtaaacaatgaaagtattaaacttaggatcgaaaaaacaagcatcattctatgttgcatgtgagttatataaagagatggcatttaatcagcactgtaaactaggtttagcaactggtggtacaatgacagatttgtatgaacaacttgttaagttattaaataaaaatcagttaaacgtagacaatgtatccacgtttaatttagacgaatatgtaggtttaaccgcatcacatccgcaaagttatcactattatatggatgacatgcttttcaaacaatatccttattttaatagaaagaacattcatattccaaatggagatgccgatgatatgaatgcggaagcgtcaaaatataatgacgttttagaacaacaaggtcaacgtgatattcaaattttaggtattggtgaaaatggtcatattggatttaatgaacctggtacgccgtttgatagcgttactcatatcgttgatttgactgaaagtactattaaggctaatagtcgatattttaaaaacgaagatgatgttccaaagcaagccatttcgatgggacttgctaatattcttcaagccaaacgtatcattttactcgcatttggtgaaaagaaacgtgctgctattacacatttattaaatcaggaaatttctgttgatgttccagccacattacttcacaaacacccgaatgttgagatatatttagacgacgaagcttgcccgaaaaatgttgcgaaaattcatgtcgatgaaatggattgattgcaatgtttaattaagaaatgcctcgggaaaggttccaatagaaagataaaaagcattggaaggatgatttttagtggaattacaattagcaattgatttattaaacaaagaagacgcggctgagttagcaaataaagtaaaagattatgtagatatcgtagaaatcggtacgccaatcatttacaacgaaggtttaccagcagttaaacatatggcagacaacattagtaatgtaaaagtattagcagacatgaaaattatggatgcagctgattatgaagttagccaagcaattaaatttggcgcggatgtaattacaatactaggtgttgcagaagatgcatcaattaaagcagctattgaagaagctcataaaaataataaacaattactagttgatatgattgctgttcaagatttagaaaaacgtgcaaaagaactagatgaaatgggtgctgattatattgcagtacacactggttatgatttacaagcagaagggcaatcaccattagaaagtttaagaaccgttaaatctgttattaaaaattctaaagttgcagtagcaggtggaattaaaccagatacaattaaagatattgtcgctgaaagtcctgatcttgttattgttggtggcggaatcgcaaatgcagatgatccagtagaagctgcaaaacaatgtcgcgctgcaatcgaaggtaagtaatatggctaaatttagtgactatcaattaattctagatgaattaaagatgactttgtcacatgttgaagcggatgagttttcaacttttgcatccaaaatactacatgctgaacatatatttgtagctggcaaaggacgttcaggattcgtggcgaatagttttgcaatgcgcttaaatcagctcggcaaacaggcacatgttgttggagaatcaacgacacctgcgattaagtcgaatgatgtatttgtaattatctctggttcaggttccacggaacatttaagattattagcagacaaagcaaaatcagtaggtgctgacatcgtattaattactacaaataaagattctgcaataggcaatctagctgggacgaacatcgttttgcctgcaggtacaaaatatgatgaacaaggctcggcacaaccattaggaagtttgtttgaacaagcatctcaattatttttagatagtgttgtaatgggattgatgactgaaatgaatgttacggaacaaacgatgcaacaaaatcatgctaatttagaataaaataaagatagtcgataatatgatgcctaggcagaaatattatcgattatttttttatttaaataataaattatagtataatatcaataataaacgaataggggtgttaatattgaagtttgacaattatatttttgattttgatggtacgttggcagacacgaaaaaatgtggtgaagtagcaacacaaagtgcatttaaagcatgtggcttaacggaaccatcatctaaagaaataacgcattatatgggaatacctattgaagaatcatttttaaaattagcagaccgaccattagatgaagcagcattagcaaagttaatcgatacatttagacatacatatcaatctattgaaaaggactatatttatgaatttgcgggtataactgaagccattacaagtttgtataaccaagggaaaaaacttttcgtggtgtctagtaagaagagtgatgtattagaaagaaatttatcggctattggattaaatcacttgattaccgaagctgttggatccgatcaagtaagtgcatataaaccaaatcctgaaggcatacacacaattgtgcaacgctacaatttaaatagccaacaaacggtgtatattggtgattcaacgtttgatgttgagatggcacaacgtgctggtatgcaatctgcagctgtcacttggggtgcacatgatgcaaggtcattacttcattcaaatccggattttattattaatgatccatcagaaattaataccgtattataaaacttgttaaaacagagaataccatggttaaaatgcatattcataaatattagattatacttagaaatatttcgctttagattaggaatttaaaataaatatttattaaacattatgaatttttaaagagtaatgtctgactcgttgataatttatttttgtaaaaataaattaaagtaatgacaaagttattgaagtaaattgagtataaacatttaaatacgatgtcgaaaatggcgatagcatatcacttacatgaagttgtgtgctatcgctatttttagttataattccaaaaagttaatcgttcgatgatttaagaattattattgtttaattcaaatgtatgagggtataaaatcattgaatttaattcgataaagcgaaatttttgaacaaacatacttttgtatttatataaaagtttaaattcttataaatttgacaaaactaattaactccgtataattatgaaacatacaagagggagtgtatgaattcatggattttaataaagagaatattaacatggtggatgcaaagaaagctaaaaaaaccgttgttgcaaccggtatcggtaatgcaatggaatggttcgattttggtgtctatgcatatacaactgcgtacattggagcgaacttcttctctccagtagagaatgcagacattcgacaaatgttgactttcgcagcattagccattgcgtttttattaagaccaattggtggtgtcgtatttggtattattggtgacaaatatggacgtaaagttgtattaacatctacaattattttaatggcattttcaacattaaccattggattattgccaagctatgatcaaattggactttgggcaccaatactattattgcttgcaagagtactacaagggttttcaacaggtggagagtatgcgggggcaatgacatatgttgccgaatcatctccagataagcgtcgtaactcattaggtagtggactagaaattgggacattatcaggttacatagctgcttcaattatgattgctgtattaacattctttttaacagatgaacaaatggcatcatttggttggagaatcccattcttactcggtttattcctaggattattcggcttatatttacgtcgtaagctggaagaatcaccagttttcgaaaatgatgttgcaacacaaccagaaagagataacattaactttttacaaatcatcagattttattacaaagatatatttgtatgttttgtagctgttgtattcttcaatgttacaaactatatggtaactgcatatttaccaacctatttagaacaagttattaaattagatgcaacgacaacaagtgtattaattacttgtgtcatggcaataatgattccattagcattaatgtttggtaagttagcggataaaataggtgaaaagaaagtatttctaattggtactggtgggctaacattattcagtatcatcgcatttatgttattacattcacaatcatttgttgtaatagtaatcggtatatttatattaggatttttcttatcaacttacgaagcgacaatgccagggtcgttaccaacgatgttttacagtcatataagatatcgaactttatcagtaacatttaatatctctgtttcgatatttggtggtacgacgccattagttgcaacatggttagttacgaaaactggagatccattagcacctgcgtattatttaacagcaatcagtgttattggctttttagttattacattcttacatttaagtacagcaggaaaatctctaaaaggttcgtatccaaatgtagataacgagcaagatagagcttattatgcagaacatccaaaagaagcattatggtgggttaaagaacgtaagaattagagattttaataaaaagtataaatcaatcgtatataagcactttaaagctagtaggttctgctaactttaaagtgctttttaaattgagaactgtaattagccgtaataaagtttttgtatatacataaacccccactgcaatgattatcgcaatgggggaaagaggggacttaaagcatatgtttagctttgaatacttaaaattctcttgctattgaaatgttaggatgtaaatatgtcttagagtattttgtccaacgcaattaatattgagactctaaccttcaatattattatagagaacacaaacttaaatagattgggtgacttatttgtgtcagttattgcgattgcgataacttcttttctctatatacatatagtaacgtcttatctaataaaaaacatggtactacagtatcaaatttatctagggcttaagtttgatttttataataggcaggtttacctgataaaaatacttattcattatataatgttaacaatatgtattttaaagtttacattgagtgagggatattgatgaacgtaattttagaacagttgaaaacacatactcaaaataaacctaatgacatagcattacatatcgatgatgaaacaattacatatagtcaactaaatgcccgcatcactagcgcagttgaatctttgcagaaatattcacttaaccctgtcgttgctattaatatgaaatcaccggtgcaaagtattatttgttatttagctttgcatcgtttacataaagtgcctatgatgatggaaggtaaatggcaaagtactatacatcgtcaattgattgaaaaatatggtattaaagatgtaattggagatacaggtctcatgcagaatatagactcaccgatgtttattgattcaacgcaattacagcactaccccaatttattacatattggttttacttcagggacaactggactgccaaaagcatattatcgtgatgaagattcatggttggcttcttttgaagttaatgaaatgttgatgttaaaaaatgaaaatgcaatagcagcccctggaccactatcgcactcgttaacattatatgcgttattgtttgctttaagttccggtcgtacttttataggacagaccacttttcatcctgaaaagttacttaatcaatgtcataaaatatcatcatacaaagttgctatgtttcttgttccaacgatgattaaatcattattgttagtttacaacaatgaacatacaatccaatcattttttagcagtggagataagctgcattcttctatttttaaaaagataaaaaatcaagcaaatgacataaatttgattgaattttttggtacatcggaaaccagttttatcagctataacttgaatcagcaagcaccagttgaatcagtaggtgtgctatttccaaatgtggaattgaaaacaacgaatcacgatcacaatggtataggaactatttgtataaaaagtaatatgatgtttagtggctatgtaagtgaacaatgtataaataatgatgaatggtttgttactaatgataatggctatgtaaaagagcagtatttatatttaacgggacgtcaacaggatatgttaattattggtggtcaaaatatatatccagcacatgttgaacgccttttaacgcaatcttcgagcattgatgaagcaattatcatcggtattccaaatgagcgttttggtcaaataggcgtattgctttattctggtgatgtgacacttacacataaaaatgtaaaacaatttttaaaaaagaaagtgaaacgctatgaaattccatcgatgattcatcatgtagaaaagatgtattacactgcaagtggtaaaattgctagagaaaaaatgatgtcgatgtatttgagaggtgaattataatatgaatcaagcagtcatagttgcagctaaacgaactgcatttgggaaatatggtggcactttaaaacatttagagccagaacaattgcttaaacctttattccaacattttaaagagaagtatccagaggtaatatctaaaatagatgatgtagttttaggtaatgttgttgggaatggtggcaatattgcaagaaaagcattgcttgaagcggggcttaaagattcaatacctggcgtcacaatcgatcggcaatgtgggtctggacttgaaagtgttcaatatgcatgtcgcatgatccaagccggagctggcaaggtatatattgcaggtggtgttgaaagtacaagtcgagcaccttggaaaatcaaacgaccgcattctgtgtacgaaacagcattacctgagttttatgagcgtgcatcatttgcacctgaaatgagcgacccatcaatgattcaaggtgctgaaaatgtggccaagatgtatgatgtttcaagagaattacaagatgaatttgcttatcgaagtcatcaattgacagcggaaaatgtaaagaatggaaatatttctcaggaaatattacctataaccgttaaaggagaaatattcaacactgatgaaagtctaaaatcacatattccgaaagataactttggccgatttaagcccgtgatcaaaggtgggaccgttaccgctgcgaatagttgtatgaaaaatgatggtgcagttttattgcttattatggaaaaagatatggcatacgaattaggtttcgagcatggtttattatttaaagatggtgttacggtaggtgttgattctaattttcctggcattggtccagtaccagccatttccaacttactaaaaagaaatcaattaacgatagaaaatattgaagtcattgaaattaacgaagcgttcagtgcacaggtagttgcctgccaacaagctttaaatatttcaaatacgcaattaaatatatggggtggtgcattagcatcaggtcatccatacggtgcaagcggtgcccaattagtgactcgattattttatatgtttgacaaagagactatgattgcatctatggggatagggggaggtctaggaaatgcagcattatttactcgattctaaccagcgattaaatgtgtcattttctaaggatagtgtggctgcatattatcagtgttttaaccaaccttatagaaaagaagtaccaccattaatgtgtgcgtcattatggccaaaatttgatttatttaaaaaatatgcaaatagcgaactgattttaacaaaatcagcaattaatcaaactcaaaagatagaagtagacacaatatatgtagggcatttagaagatattgaatgccgacagactcgcaatatcacacgttatacaatggctttaacattaactaaaaatgatcaacatgtcataacggttacacaaacttttattaaggcgatgaagtagagatgaagtttaatgagatatggataaatgaatatttggcgctcgtaaatgatgataatccaatacataatgagattgtgccaggacaattagtgagtcaaatgatgctgatggctatgtcattagagacaaaccagtgtcaaattaactacgttaaacctattttaataaatgaaaatatcgaattcattgaacaacacgaacacgaaattatagcaattaatgacgatggagagattaaaataaaaatttctttgagcacaaaaaaataaccgatattagctgcatgaacgcatattaattaggagatgaaaggacagctaatatcagttatgtattgttattattattgggaacagagatgaatataggttacgtttctttctttgcacggggatgcattaatctaaaataataataacaactatatcaatgtttaataaattctggattattggaacgattagtcaatttaactaactttcatatgatctatatcgtcttgtaataaagagagcaatttgaatatttcagtatcactaaatgaatcgtcacatttaattgaaacatgctgaaacgttttggttataatttcataaactggtgcgccttcatggtgatactgtcgataaataatcataacctatattacctcctttgctactctatggttatattataaataacatttttatgtgtgacatcaaccttaagtatcaactttttatcagacatagaacgtatgatttactaagactatttatgtataaaagttctaaataaatatatatttatagagtcgcctggcagtcatttgggaaatataacatatatgattagagaggcatctatcgcaaaagaatgataatgatagaggtattgagcatatagatgagtttaagttcatcttgaaaataaagggttatttagtcatagatgtagatgtataggaaatatttgtatgtattgttcgatatgtatgaaattttcaataaaagctaataacgcttatatgtaactttcaaatttaaattatatacagagcatgatgattataaaaaaataaccacatcacataaattgagttcatacccaatttaagtggtgtggctaataatgttgatttatagatgaaccgcctaatcgttaaacctctgttacttcaacatcgatatgttcaatacggttgtatgcaccgtgatccacaggaccaacaaaatcattcattttccaaccgtttttaatagcagaagcgacgaaagctttcgcgctaatcacagcttctttcggtgacttaccgttagctaaatatgcagttgttgccgcagcaaatgtacaaccagcaccatggttataactttgttggaacatgtctgttgttagttgataaaatgtttgaccatcatagtataagtcatacgatttatcttgatctaaagctttgccacctttaatgatgacatgctgtgcgcctttatcaaagataattgttgcagcctttttcatatcttcaattgaatttaatttacctaatcctgataattgacccgcttcaaataagtttggtgtcactaccgttgctttaggtagtaaatatttaatcatcgcctcagtatttccaggattaagcacttcatcttcgcctttacaaaccatgacaggatctactacaaaatattgtgcattagatgcctcatatacttctccagcacgtttgattatctcctcagtacctaacatacctgttttaatagcatcaggtccgattgataaagccgtttcaagttgtttttcaaatacatccattggtaatggtgtaacatcgtgtgaccatgtatctttatccatagtaacgatggcagttaaagcgaccatgccatacgtatctaattcttggaacgttttcaaatctgcttgcatacctgcgccagcacttgtgtcagaaccggcaattgttaaaactttctttaaagccattgagcttcactcctacataataatattgtattcatcatatcatttttaacctaattgaaaaatattaagcattcaatatttgatgattgttgaaatgaatcattcatactattgtaacttttgaaaatgtcattcactttagataagtgtgatatgttaaaatatgtcctgaggtgagattgaatggaatggtcgcaaatttttcatgacataacaacgaaacatgactttaaagctatgcatgattttttagaaaaagaatattcgactgcaatcgtataccctgatagggaaaatatatatcaagcgtttgatttaacaccgtttgaaaatatcaaagttgttatattaggacaagacccgtatcatggtccaaaccaagcacatggattagcattttcagtgcaacctaacgcaaaattccctccatctttacgtaatatgtataaagaattagcagatgatattggatgcgttagacaaacaccgcatttacaagattgggcaagagaaggcgtcttgttattgaatacagttttaaccgtaagacagggtgaagcaaattctcatcgtgatattggttgggaaacatttactgatgaaattattaaagcagtgtctgattataaagaacatgttgtctttattttgtgggggaaacctgcacagcaaaaaataaagcttatcgatacatctaaacattgtattataaaatcagtgcatcctagtccactgtctgcatatagaggattctttggatcaaaaccgtattccaaagcgaatgcctatttagagtcagtaggaaaatcaccaattaattggtgtgaaagtgaggcgtagatgttgaatagagaaactttaatagcacgaattgagcaagaattagtacaagcagagcaggcacagcatgaccatgactttgaaaaacatatgtatgccatacatatattaacatctttatatgcttcaacatcaaatacaccacatattggtgaacaacaaatgaatcgtcgtattgctaaccataatcaaatgccacaatcacaaataacgcagccaactcatcaagtgacagttgctgaaattgaagcgatgggtggtaaagtaaatacgcattcagcacatcatcataataagtcatattcacaaccttcaaaccaacaacaaagattagcgacagatgatgacattggcaatggtgaatccatatttgatttttaaaaagcaacaatgaaacataattacttaatagcttgttaagtatgtaggttaataatcaagacgcatatacttttattcgagtgttcggatttaaacatttattaatactgaattatataaggagaggtagcaatgaaattatttattattttaggtgcattaaacgcgatgatggctgtcggtacaggtgcatttggtgcgcatggtttacaaggaaaaataagtgatcactatttatcagtatgggaaaaagcaacgacgtatcaaatgtaccatggcttagcattattaattataggtgtaattagtggtacaacttcaatcaatgttaactgggctggctggttaatatttgctggtattattttctttagtggatcattatatattttagtattaactcaaattaaagttttaggtgcgattacgccaattggtggcgtattgttcatcattggatggataatgttaatcattgcgacattcaaatttgctggttaaattttaaaactttagattacctatgtaactaaacattaaatttttaataaaaataatcaagaaaaagagttacaaactcatcttttgggtatagaataccttcgaggtgagtttttatttatggaaaaaaagaataagcaaatagatagaggcgatttaaaacaaaacctatctgaaaagtttgtatgggcgattgcatatggttcatgtatcggatggggcgcattcatcttaccaggagactggattaagcagtcaggtccgattgcagcatcaattggtatagttattggtgcattattaatgatattaattgcggttagttatggcgcattagtagagagatttccagtatcagggggcgcgtttgcctttagtttcttaagtttcggcagatatgtgagtttcttctcatcatggtttttaacttttggttatgtctgtgtcgttgctttaaatgcgaccgcattcagtttactagttaaattcttattgccagatgtcttaaataatgggaaactatacaccattgcgggctgggacgtttatattacggaaatcattattgcgaccgtattactacttgtattcatgctagtaacgattcgtggcgcaagtgtatctggatcattacaatattatttctgtgtggcgatggtaatcgtcgtattattgatgttctttggttcattctttggtaataattttgcacttgaaaatttacaaccgttagctgaacctagcaaaggatggttagtgtctattgtggttattgtatccgtggcaccatgggcatatgttggatttgataatattccacaaacagcagaagagtttaactttgcaccaaacaagacatttaagcttatcgtgtacagtttattagcagcatcattaacttatgttgtcatgattttatacactggttggttatcaacaagtcatcaaagtttaaatgggcagttgtggttaacaggtgctgttacacaaacagcatttggttatattggattaggtgtattagcaattgcaattatgatgggtatatttactggtttaaatggattcttgatgagttcaagtcgcttgttattttctatgggacgttcaggtattatgccaacaatgtttagtaaattacatagtaaatacaaaacaccatatgtcgcaatcatattcctagtaggagtgtcgttaattgcaccttggctaggaagaactgcattgacttggattgtagatatgtcatctactggtgtatccattgcctactttattacatgtttgtctgcagcgaaattattcagttataacaaacaaagtaatacgtatgcaccggtttacaaaacgtttgctattatcggctcatttgtatcattcattttcttagcgttgttattagtgccaggttctcctgcagcactgactgcaccgtcttatattgcattacttggatggttaatcatcggtttaatattctttgtgattcgatatcctaaattgaaaaatatggataatgatgaattaagtcgcttgattttaaatagaagtgaaaatgaagttgatgatatgattgaagaacctgaaaaagaaaaaactaaataataaaagaatcgcacaataaaccttcttcattcggaggcgtatcgtgcgattttttgtattataaattgacgtttaagacgaggcagctgaaccttatatataattgctaagagttagggctgagccatttctaacaaatatttataatcgtttaaaagatttcacgaacccagaaacaattaatttggaaatttggtcggcgaataataaacctaatgcgatggcgcctgcaataagtgtaacctctagcatggtattgattgctgtactgaaatttaataagactaaattttttgtagcatcgtatgctaagccaccaggtactaatggaatgatacccgttaccataaaaatgatggcaggttctttttgtttacgagccatataatgacttaacaagcctaatgctaaactaccaaagaaactagagtatatagtgtgcacattaaagccgttgaagaataaggtgtaaaccatccatccacacgtaccaacgaaaccacatgatagatataattttctaggtgcatcaaaaatgacgcagaagaacattgaagctaaaaagctaaagataaagtttaagatccaaaacatagtctgatactcctatactaaaattaatacgctaccaacgccagcaccgatgccaaacgcagtaaccaatgcttctaatgatttcgttgtgaacatcaacatgtgtccaccaaataaatcttgtattgcgtttgttattaatacaccaggaacaataggcatgactgccgcaatgataatagttgccaagtcacctgttggaataagtgtatgtccaataacggcgataatcccaataactaatgaaccaatgaattctgggataaactgtgcgtgtaacttacgatctaaaatctcagtgactaggtatcctagactacctgctaatatcgcagttaaaacatcaatcaatctaccaccttgtaaatataagaaactcattgcaatcattgctgcagcaaaacctttaaagggaagactgctgtcacgcttagcaacatatattttttcaagttgcgtttttgcttcggctaaagaaatttcattgtttgtaatttgacgcgaaattttattagcttgagaaatttttattaagtttgtatctcgagaggtaattctaaatattctaggaaacgattccgaatgtaacgtaaactggatgacagtgtttgtaacaaagctgttactttcactgtaaccaagtttttttgcaatacgtgtcatggtatcttctacacgcgtaccttctgcaccagattctaatagtatgcgagcagcaagcatgacaacgtctttgataagtacctcttgtttgtattcttctgaatttatgtccatttcatcaccattgtttataagaatttaatactcattatagtttatacactataaaataaccacatgagctttttgataagttgttattgattttaaaaaactaatatttgatactattgtaataataatcatcggaatttttagtagttaaaattctcttgaagtataaaaaggaaaaattattgaaaaaaattcgacaaaaatatgtttcaaatatttcaaataggttaaaataatattagttaaccattacaaaaattgtatagagtagcgactgtataatttctattgaggttaacgtttatatgtagtgatagtagttaaagttctcccaaggaagactactcgggtacactttgctatgagcaaagtgtactttgttattgataatacattagcacatatatataagtttaaacatacagatttcaactatttaccaaatcacgtcttatgtatacgggaatatactgaagataaacgaaaaattccaagcttaaaccgataagcttggaatttttttattaatttataaacgtaccaatgtattaagaaatcgcaaagaattgatcgaattcgtttgtgttaataatatgtcctacaaagaaactaccgaattcaccgtatcgtgctgttgtttcatcaaagcgcatttcgtatacaatttttttgaattgtaatacgtcatctgagaacaatgttacgccccattcgaaatcatcaaaccctacagaaccagtaataaattgtttgattttgccagcatattttctaccaatcataccatggtcatacattaatttttggcgttcttccatagttaacatgtaccagttataagtttcattacgacgtttgttcattggatagaaacaaatataatcagaatgtggtaattctgggtataatcttgctttgatatgagggttctcataaggatcttcatcagatttaccagctaaataattgctcaattcaatgactgatacatatgaatatgtagggattaggaagtcagcaatgcgcaatttgttaaattcattttcaatatgatttaaagacttcatttcaggacgtaagaaccataataacaaatctgctttttgaccagttatattataaatagcttgatcaccagattttgatgatcttacagttgctgtattttctaaaaatgattgaaattcagtgacaagtgcatcgcgttcgtcctttggaactatacgtaatgatgcccaatcaactgcataaaataaatgtagactataccaaccatctaatgtttcggctgcttgactcatgtttatcgctccttttcaaaaatcatcagttctttataaattttatcataaagcaaaggggtaacgataaaattatgattacaaattggtgacgtggcattatgaaataaaatggcgtataattataccgtgaatgattaataagatttatattacaggaggacattatggctgatttattaaatgtattaaaagacaaactttctggtaaaaacgttaaaatcgtattacctgaaggagaggacgaacgtgttctaacagctgcaacacaattacaagcaacagattatgttacaccaatcgtgttaggtgatgagactaaggttcaatctttagcgcaaaaacttgatcttgatatttctaatattgaattaattaatcctgcgacaagtgaattgaaagctgaattagttcaatcatttgttgaacgacgtaaaggtaaagcgactgaagaacaagcacaagaattattaaacaatgtgaactacttcggtacaatgcttgtttatgctggtaaagcagatggtttagttagtggtgcagcacattcaacaggcgacactgtgcgtccagctttacaaatcatcaaaacgaaaccaggtgtatcaagaacatcaggtatcttctttatgattaaaggtgatgaacaatacatctttggtgattgtgcaatcaatccagaacttgattcacaaggacttgcagaaattgcagtagaaagtgcaaaatcagcattaagctttggcatggatccaaaagttgcaatgttaagcttttcaacaaaagggtctgctaaatcagacgacgtgacaaaagttcaagaagctgtcaaattagcacaacaaaaagctgaagaagaaaaattagaagcaatcattgatggcgaattccaatttgatgctgcgattgtaccaggtgttgctgagaaaaaagcgccaggtgctaaattacaaggtgatgcaaatgtctttgtattcccaagtttagaagctggtaatattggttacaaaattgcacaacgtttaggtggatatgatgcagttggtccagtattacaaggtttaaattctccagtaaatgacttatcacgtggctgctcaattgaagatgtatacaatctttcaattattacagcagcgcaagccttacaataacgatggatttagcgagtaaatattttaatggcgtcaactggcgatatatcgatcattcttctggattagaacctatgcaatctttcgcattcgatgatacattttgcgaaagtgtgggcaaagatatatcagataatgttgtgcgtacttggattcatcaacatactgttattcttggtattcatgattcaagattgccgtttttaaaagatggcattgattatttaacgaatgagattggttataatgccattgttagaaattctggtggcttaggtgtcgttctagatcaaggtgtattaaatatatcgctgatgttcaaaggacaaacagaaacaacgattgatgaagcgtttactgtgatgtacctcttaattagcaaaatgttcgaaaatgagaatgttgatattgatacgatggaaattgaacattcttattgcccaggaaaatttgacttaagtatcgatggtaagaaatttgcaggcatatcgcaacgaagagttagaggcggtattgctgtacaaatttatctttgtgttgaaggctctggttcagaacgtgcattgatgatgcaaacattttatgaacatgctttaaaaggtgaagtgactaaatttaaatatcctgaaattgaaccatcttgtatggcctcattagagacattgcttaacaaaacgattactgttcaagatgtaatgtttttactattatatgcaatcaaagatcttggcggtgtattaaatatgacgccaattactcaagaagaatggcaaagatacgatacgtattttgataaaatgattgaaagaaacaagaaaatgatagatcaaatgcaatagttaaatatttaacagcccctttcaagttatcgtttggggctgttatttttgaaagtatccataaaaagcataaatatgttattgacctaatatttaaattgaacatcattaaattaaaagtaatgatatgatggaaataataaatttaataagaaaatttcatgttttacgtattaaatagattgagaatagggtatatataatgcgtatgactatgaaagaaacgaccttctattgaaatgttctaatactttagtagtaaatctatatattccaattattatttgtagtattatagttagggtggaaaattataaattgtagggctattttataaaaagataaagaatctgaaatatcactcgataagatttaaactttgaagtaaacgaaagttagttttatactaatcaagttaagtcaaatataaattcaaaataaagattatacataatatgaataatgtgagataaagactgcaatgaaatttaacgcgaatgcgtatgcaacttagaatatgatgtcttttactaataaataaaaataatgaatcaagtataggataaatataaaaggtgatattgacatgacaagaaaaggatatggggaatcgacaggtaagattattttaataggagaacatgctgttacatttggagagcctgctattgcagtaccgtttaacgcaggtaaaatcaaagttttaatagaagccttagagagcgggaactattcgtctattaaaagcgatgtttacgatggtatgttatatgatgcgcctgaccatcttaagtctttggtgaaccgttttgtagaattaaataatattacagagccgctagcagtaacgatccaaacgaatttaccaccatcacgtggattaggatcgagtgcagctgtcgcggttgcttttgttcgtgcaagttatgattttttagggaaatcattaacgaaagaagaactcattgaaaaggctaattgggcagagcaaattgcacatggtaaaccaagtggtattgatacgcaaacgattgtatcaggcaaaccagtttggttccaaaaaggtcatgctgaaacgttgaaaacgttaagtttagacggctatatggttgttatagatactggtgtgaaaggttcaacaagacaagcagtagaagatgttcataaactttgtgaggaccctcagtacatgtcacatgtaaaacatatcggtaagttagttttacgtgcgagtgatgtgattgaacatcataactttgaagccttagcggatatttttaatgaatgtcatgcggatttaaaggcgttgacagttagtcatgataaaatagaacaattaatgaaaattggtaaagaaaatggtgcgattgctggaaaacttactggcgctggtcgtggtggaagtatgttattgcttgccaaagatttaccaacagcgaaaaatattgtaaaagctgtagaaaaagctggtgcagcacatacttggattgagaatttaggaggttaatgcgttgattaaaagtggcaaagcacgtgcacatacgaatattgcacttataaaatattggggtaaaaaagatgaagcactaatcattccaatgaataatagcatatctgttacattagaaaaattttacactgaaacgaaagtcacttttaacgaccagttaacacaggatcaattttggttgaatggtgaaaaggttagtggcaaagaattagagaaaatttcaaaatatatggatattgtcagaaatagagctggcatcgattggtatgcagaaattgaaagcgacaattttgtaccaacagcagcagggttggcttcatcggcaagcgcatatgcagctttagcagcagcttgtaatcaagcgctagacatgcagctgtcagataaggatttatcgagattggcgcgaattggttcgggttctgcgtcgcgtagtatttatggtggatttgcagaatgggaaaaagggtatagtgatgagacgtcatatgccgttccacttgaatcgaatcattttgaagatgaccttgccatgatatttgttgtgattaatcaacattctaaaaaggtacctagtcgatatggtatgtcattgacacgaaacacatcaaggttttatcaatattggttagatcatattgatgaagatttagctgaagcaaaagcagcgattcaagacaaagattttaaacgccttggtgaagtaattgaagaaaatggtttgcgtatgcatgccacgaatctaggatcaacaccgccgttcacatatcttgtgcaagaaagttatgatgtcatggcgcttgttcacgaatgccgagaagcggggtatccgtgttattttacaatggatgcgggacctaatgtgaaaatacttgtagaaaagaaaaacaagcaacagattatagataaattattaacacagtttgataataaccaaattattgatagtgacattattgccacaggaattgaaataattgagtaaggaagagataaaatgattcaggtcaaagcacccggaaaactttatattgctggagaatatgctgtaacagaaccaggatataaatctgtacttattgcgttagatcgttttgtaactgctactattgaagaagcagaccaatataaaggtaccattcattcaaaagcattacatcataacccagttacatttagtagagatgaagatagtattgtcatttcagatccacatgcagcaaaacaattaaattatgtggtcacagctattgaaatatttgaacaatacgcgaaaagttgcgatatagcgatgaagcattttcatctgactattgatagtaatttagatgattcaaatggtcataaatatggattaggttcaagtgcagcagtacttgtgtcagttataaaagtattaaatgaattttatgatatgaagttatctaatttatacatttataaactagcagtgattgcaaatatgaagttacaaagtttaagttcatgcggagatattgctgtgagtgtatatagtggatggctagcgtatagtacttttgatcatgaatgggttaagcatcaaattgaagatactacggttgaagaagttttaatcaaaaactggcctggattgcacatcgaaccattacaagcacctgaaaatatggaagtacttatcggttggactggctcaccggcgtcatcaccacactttgttagcgaagtgaaacgtttgaaatcagatccttcattttacggtgacttcttagaagattcacatcgttgtgttgaaaaacttattcatgcttttaaaacaaataacattaaaggtgtgcaaaagatggtgcgtcagaatcgtacaattattcaacgtatggataaagaagctacagttgatatagaaactgaaaagctaaaatatttgtgtgatattgctgaaaagtatcacggcgcatctaaaacatcaggcgctggtggtggagactgtggtattacaattatcaataaagatgtagataaagaaaaaatttatgatgaatggacaaaacatggtattaaaccattaaaatttaatatttatcatgggcaataaatgatttgataggggagcaatcatctaatttaattagaagataaatgctccattttttattgtcagccgtgttacgtatcttgaaaaaaatattaaaaagagtaaaatagatagagttaacgaaaaaattaatgaaatcgacgatatagatatgataaagaaaggtgggtagcaatatgaaaaatacattccttatttgtgatgaatgtcaggcagtcaatataagaacgttacaaaagaagttggaaaaattagatcccgatgctgaaatcgtgataggttgtcaatcttattgtggacctggacgccgaaaaacattcacttttgttaataaccgcccactggctgcgcttactgaagaagaattaatcgaaaaagtttctcaacaattaaagaaaccacgtgatcctgaagaagaagagcgtttaagaaaacgacatgaagaacgtaaacgtcgtaaagaagaacaagatagaaagcttaaagaaaaattagaaaagcgaaaagcacaacaataaagcctgatggcagcatcattcaatgcgtgccaccaggtttttatgttttgtctagaaattaaataaatcattaaatgattcggccatcgtaggatgcgtataaatattatctcgtaatacggtatatggaatgttttgatcaatcgcaagtttaattatattaattaattcttcagattgcttaccatataatgtagcacctaaaatcatattattttcattattaatgactactttaaataaacctcttggatcattgttaattttatgacgaggtatagcacttactaaaagttgatgttcagtgtaatcataatgttgagcggcagcttctttactagttaatccaacacgtgataatggtggatctataaatactgtataaggcacgctgcctctattgtcagtcgtacgtgactgattaccatataacgctgatttgataattcgataatcatctaaagatatatacgtaaattgaagtccgcctttaacatcacctgcagcataaatatgcggcacagttgtttgaagatgagcattgactttaatttcgcctctgtcgcctaattcgatatcagtattttctaaagctaaatccgtattcggtttgcgcccgatagccaaaagtactgcatcagcctcaaagttatcaacgttggtatggactgttgtatgatgattgtcagatgacaattcagtcgtttcaacatttgtatgcaatgcaatgcctttattttctaagtcagtaataccatatgcaacgacatcttgatcttcgcgtggcataaatgattcgccacgttctaatactgttaccttactacctaaattcgcaaacattgaagcaaattctaaggcgatataaccgccacctacaataacgaggtgcttaggttgatagctaatgtttaataaacctgtcgaatcgaagacgtgtttagcttgatcaaggcctttaatgttaggaatgacagaggtagcaccggtattaataatgatatgaggtgcagtaatactatcgacgatatcgtcatgttgatctaataaattcacttcagtattagatttaaactgcgctttaaaatccagtacatcaatgttgttatcgtctgctaataagtggtaatttttattgtttagcgcattgacaacatcgtttttacggttataacttgcttcaaaagatttgccttctaatccatcatgtacaagtgtcttcgaaggtatacatcctatgtttatacaagtgcctccatacattttcggagattgttcgataactgcgacgtgttgacctgttgatgcagcgtatttcgctaaagttttaccagctttcccaaatcctattacaattaaatcatatgttttcatgacataaatcctccttttgaatgtcttcaatgacatctttgattgtttttccattataaaaattaataatgatattctgttcgtcttgctgataatgtgacatggtagttgcaatattacgagcaatttgacagtgactgccttcgtcgccagtaaatagacgtgtgtggtgttctttctctaagacaaaatgtttatataatgttgctagagagacatcagcactttgatcatttgctaaataaccgccatctttacctcgtattgtgtcaatcatttttaaatcgacaagttgagtcgtcacgcgtcgtaattgaacaggatttaaacaagttaattctgctaatgaactactattgaatttttctgaatgatgcttagttaaaaaagctaatacatgcacggcaatgttaaattctaaattcaatgtttctcacctcataattgtaactgtattagttacaattaaaaatcattttgctcaatgtgtcaatacttatgtttgaaaagtgttgaattaggtgtggttattgtgatgatttattgtttgaaagttgatgcattaacggtgagattgcacaattgaaattttaattatgtatgaactgatagatatgaaacgaatattgaaaatgagagcaataaaattttgaatgatgatgttgtgtgattgtataaacttattcgtattttagatacgttttgatatttcgcatgatgaggaaatacttttaacaactgatgacatattttaatagtgaatatattttgagatattaatatatttaatgttaaggatgttgtcgcaataaaattaaaatattgaaagataatttttattgattaattgcgaatatacaaagacaccattatatccatatgctaaaataagaaaaaaggcgacatgttatctcaatttacctgcatctagactcctttacataagaaataatcatcgccgagttttaaaattttacaactttgtagatgtaaaaagcatttgattttaaatagtttgaaaatcatatatttttgaaaaaggagcatgccgatgagtattgacatgtatttagacagatctcgaaaccaagcttcaagtgtggggaatttgagtcaaacaatgaattcaaattatgatgcgttggaaaaagcaattactcaatttattaatgatgatgcgcttaaagggaaagcgtatacgtcagctaagcaattttttagtacggtgttaattccattatcaacaagtatgaaaacattgagtgatttaacgaagcaagcttgcgataattttgtgtcacgttatacgagtgaggttgatagcatatctttaaaagaatcagagcttgaagaagatatcagatcattaagtcaacaaattacgcgatatgaaaatttgaataacaatttgaaaaagcatgcttccgataatcagcaagccatttcatcgaaccaacaaataatacgaacattaggtcaacaaaaacatgaattagaagagaagctacgcaaattgcgtgagtttaatcaaaaatcaccagaaatatttaaagaagttgaagaatttcaaaaaattgtccaacaaggacttacccaagcgcagaatttttggaacttttcaacaaatcaatttaatattccttcaggtaaagaacttgattgggccaaagcaagtcatgaaaaatatttgaaagttgctatggggaaaattgaacataaagcagagaaagaaactttaaataaagcagactttgctgttataaaggcatatgccaaagaacatccagaagacgatatcccgaaaagtatattgaaatatataaatgacaataaagacagtattaaaagagatataggattagatattacgtcaacacttttagagcaaggcggtataaatgcaagtaaattcggtgtatttatcaatacagcaggtggagtgaaaggcccagcaggtccaaattcatttgtggaagtcaaacgtacatcaggtaatgtgtttatagaaaatggtagtaaatttgcaaaaggcggaaaatacctaggtaaaggtgttgctggtgtaggatttggtataggtatgtatgatgaccttgcaaatgatgataaaacatttggagaggcgttgtcgcataatggtatgacgcttgcagctggatctgcagggacagcagttggagctggattagcgacttttgttttaggaagtaatccagtaggatgggtgattttagcaggtttggctatgagtacagtatttgcattaggaacagatttaatttatcaaaataatatttttggattaaaagataaagtagactgggtagggcataaaatcgataatagtatagatgttgttaaaaaaactacagaaaaatccatggatagtgttgggaatgctgttagtgaagctaaaaatattattagcaatcatataaatccaatgaaatgggcgtggtgagttttgctttttaatattaaggttattaataaaaatccgagatataaagtcgttcaatataatgatgagtatttgttaattgatttagtaagcacttggcttgtatacttttttccttttattaattggttcattcccaaaaggtatgcaaaacttagtgagaaggaacttgaaaatttaaatgttgataaacaaaataaaaataatattttctggccagttactggtagttcgtttttatttgtagttattttacggaaatatgtacatacgtttgaagttcaattagataataagattttaatatctttatgttttataggatttataggtattgcagcattttacatttacttaaataaaaagcttaaactaaagatatatgatgataatctagataatgaaaatagggttatattagtgcctacttttaaagatggaagttttatagttttcacatatctattattaggaggttgttctatattatttttaatatggctaatgactataaaacctcaaaatctactggtatttattatgtggattattattacaatttttttctttctaataagcatgggctcaattagtaataaaaaggtttatgccaaacttaaaaagcaatagaaattactaaacttagattgtagttcgtaagttaagtaataaacaggaaaatagtatgttactaaaatacaaaacacttataaagtatctgaaagtgtattagatataaaaccaacgagacggaagtggagatattgctttgcgaggttagagttgtaaacaaaaatcccagatatagaattattaaatataaaaacgactatctgatgattgatttagtaagcacctggttagttttgttctttccgtttattaattggttaataccaaaaaaatatgtccaaatcagcagagaagattttgataatttaaatattgtcaaaccagttaaaaataaagctttatggccagctataggtagcatacttttatttggcactatgtttagagataaaatatatatacctgattctcatttagaaaaaaattgcgttattatcatttgttcggttttattattaagtattctagtgttttatatatatttaaatcagaaagtaaagttatctatctataatgatcggagtagcaatggaaaaattatgatttttccatcattcaagaatctttgctttgtactattttcttattttttctgtggtggattatcaatcatgttcttagatgttttgattagtttatctatccaaaatattatagtatttattgcttgggttattatgacaatgctatttttctttataaatatgtcttcaataatagacaaaaagattcatgttatatatttaaggtcatataaatattaattttgatacaaaagggcacaagtgttttgagaaacagaaacgataatatagctgtgtgaatttgttattaataggaagtgataattattgctttgtgaaaccgaaattatcaataaaaatccgaaatacagagttattaagtatgatgatgagtatttaatggtcgatgtaataagaacttggcttgtatacttttttccatttattaattggttcattccaaaaaggtgcgccaaaattagtagagaagagtatgaaaaactgaacactgttaagccagttaaaaataaaaatttttggcctgttgtaggaggaacaatcctactaggtgctacttccagaaagtacatacacttacttaatattcaattagaaaaaagatcggttatatttatatgcttcgttgtatttctatgtattttaatcttttttgtgcttctgaatcgaaaattaaaattgaaagttttcgataataaaaaagaagaacaaaaaataattttagtaccaacattaaaaaatgctgttcttatattatatggctatttgttgattggaggcatgtcaatattagctttaagcatgttgctgacattagaaaaccagaatttaataacttttatagcttggggtatggggttaatgttgtttttcttgatgaatataacactcattgtcaataaaacagtcaaagttataaaaaggtgaataaataactaattatattgtattggccgttcttcaaataaaaaataatttgaataaggtggaagtgataaacagtgctttgcgaatctagagtcattaatcaaaaccctaaatatagaattattaaatacaataatgaatatttcatggttgatttagtaagtacttggattgcttattttttgcccatgattaattggtttattcccaaaaagtacgcgaaaattagtagagaagaatttgaaagtttaaatattgtcaaacccgctaaaaataatactttctggcctgttgcaggatttgcagtgttattaacaaccttaacaagaaaatatatctatttgcttaacatccatttagaaaaagaaatagttatattaacatgctgtatgatacttctaggtgttttcgcattgtttatatatataaatacaaaattgaagttacatatttttgataaaaataaaagtaataacgaaaagatcatattaatacctacatttaaaaatatttgtttatccttatttgcttatatattatttggtggattgtcaacaatggctctgagtatgttagtaacttcatcccctcaaaatataatagaatttcttgctttaattggcatgactgcatgcttctttctactgaatatgtcatcggttctagataaaaaaattcatgttattttaaaaacaaataagtagtaaaattgattaacttaggtagtatcggatacttaaatgttggttcataaaaagcaatgattttaaatcgaggagctatcttagaacagggaaataaaacagccaaagttataaaaagtgaattaataactaattatattatgttagccacgcttcaaataaaaaataattagaataaggtgggattgataatcaatgctatgcgaatctaaaatcatcaataaaaacccaaaatatagaattattaaatataatgatgagtacttaatgatcgatataataagcacttggattagtttattttttccttttattaattggttcatccccaaaagatacgtcaaaattagtagagaagagtttgaaaatttaaatattgtgaaacctgctaaaaagaatgttttttggccagttgcaggtatctctactttattcgcagttacattaagaaagtatacacatttacttgacactcaacttgatagaaaattagttattgctatatgttgtatcacatttatagggattttaacattttatgtacgcctaattaaaaaatcatctttaaatatttataatactaaaaataaaaggtcaaaaattatcttaataccaacactaaaaaatttttgtttaacattgtttagatatgctttttttattttatggacagtgattttctcatatgctctattatcaatgagttatcaaaacataatagtatattttgcttggattacagcaataatgggtttttttctagtgaatatagctttaattatagataaaaacattcatgtcatacttaaaaattaagtgaaagtactaaattcagattaaaaatatgaaaatatcagttaataaaacctttgatgacagtaacttgatagtatttgaatgtcttttgaagtatcgaaaaatgtattacacataaaattaaagggatgtggagacattgctttgcgaatctaaagttattaataaaaaccctaaatatcgaataatcaaatacgatagtgaatatttaatgattgatttggcaagtaattggattgtcttcttctttccatttattaactggctcataccgaaaacatatgtcaaaatcactaagaatgattatgaaaaattaaatattgtcaaaccagttaaaaataaatcgataggatggaccatattcgcgggtattgtgttacttggtggtactgtaagaagaaatacttatttatttgattttcaattagaagaactaattgtttggagcagctgtttcattgggtttttagagattatatttttttattgttatctaaataagaaattaacattaaatatttataatgaaagtaaaaataatgaacttaaattaagattattaccctcctttaaaaatatttgtttcacaattttttattacctatttactggtttcatgtcttatggggcattttacttgttggtatttgaaaatgtgcaaaatttaatcttatatgtttcttggcttttcatgactatgctatttatgtttatgaatatgcattcaattatagataaaaaagtacatatattcttaaagtctaataaatagttacaaatttagttagttttcaattgttaattaggggtggtaaacagtgctttgtgaatctagacaaatttataaaaatcctaaatatcgagttattagatataataatgaatatttcatggtcgatttagtaagtacttggattacttattttttccctatgattaattggtttttgcccaaaaaatacgcaaaaattagcgaaaatgaattttaaaggttaaatatagtcgagcctgttaaaaataatgttttttggccggttgcaggaagttcagttctatttggaattatattgagaaagtacggtaacttctttaatgttcagtttgaaaaacaactagcaatcactgtattttttatcatgttaatagggatgttaattttttatttttatctaaataaaaaattaacattaaaaatttttaataccaacgtggttaataagaatagagttgtattaataccgactttcaaacaaggattgttaatagtttttgcgtactttttttaggaagcgcttcaatatttactttaaccattcttttgacgacagagtcacaaaatataataatatttttaacttgggttattatcacgatgtttttctttttagtgaatatggcttcgataggtaataaaaatgttcatgttattttaagaataaacgagtagtaaaaatgatcgaaattggtagtatcgcatatttaaacggtggttcaaaaaaatataatcatatcttaaatcaggaaaatagatagtagtgtttgaatataccaagtgaaaatgcccattgtgattgataaaggaaaaaactgttttaatttaaaaatgaaatatagagcgtgttattttgtatgatagctcttataacattggcgtttttaatccaatagtatggacggttttagctggttttgttgcggaatctgtttagacaattcttaaaaattggacttttcatactaataaatttggattaagagataaaactaattggataagacattaaatagacgctgtttaaaaataccacagaaaaagctgtagatagtgttggaacgatagttggtgaaggtacaaaaagtattggggatcatttaaaactaatgaaacgggagtggtaaatgttgctttgcgatgtcagagtcatttataaaaatccgaaatacaaagtcattcaacataacggtgaatacttattagtcgatttagtaagcacttggttcgtgtacttttttcctttcattaattggttcattccaaaaaagtacgcgataattagcgaagaagaatttgaaaatttaaatgttgttaaaccaaataaaaataatgttttctggtcagttataggaagttcggttttgtttggagttactttaaggaaatacatacatgtttttgatgttcaattagataagctagttgtaatgatattgtgtgctctcgctttaatttgtgttatagttttttattttaacttaaatagaaagcttaagttaaaagtgtttgatacaaatattgaaaaaaataagagagttatattaataccaacgtttaaacttggctgttttttagttttcggatatattttcgctggaagtttttcaatattttcattaattgcccttatgacaatcgaacctcaaaatataataatatttatttattggattatgatgacaatgcttttctttttgttaaatatgacttcgataggtaatgaaaaagttcgcgttataatgaaaaataattgattacatttaaaatattctaaatgttgtcgacacaatccttttaagacgctagtagaatttaaatgacttctaatgtatatgaaagtgtatcaatataaaaccaattgaaaagaagtggagacattgctttgtgaaactgaaaatattaataagaatcccaaatatagaattatcaaatacaaagatgaatatttgatgattgatttagtaagtacatggttagcactctttttcccaatgattaattggctgattccaaaaaagtacgtcaaaatcagcgaaaaagattttgaaactttaaacattgtgaagacagctaaaatcaattctttttggccagtggcaggaagtacggtcttatttggtgttatgttaagaaggtattcccatttatttatcgttaaatatgaatatagtatagtaattttaatttgttgcatcataatactaggtatttttctgttttttttatatttaaatcaaaagttaaagttacaaatctataatgaaaacaaaaataaaagcaataagataatcatatttcccactttaaagagtctttgtttatcaatagttttatatatttatttaggtggtggttcattctttactatttatatgttattgacgattgaagttcaaaatataatattatttataactttgtttgtaatatttttgtttttcttatttttaaatatgtgctcactatatgacaataaagttcatgtattatttaaatcaaatggaattgaaaagttttaataggaataataaacaaaggaatggtagtgataaatattgctatgtgaatctaaagttatcaacaaaaatcctaagtatagagttattaaatatggtgatgaatatttaatgattgatttagtaagtacctggttaactttatttcttcctatgattaattggttaattccaaaaaaatatgtcaaaatcagtaaaaaagaatttgacgatttaaacattgtcaaacctgttaaaaataaagctttttggccagttgcaggtagtactattttgttcggagttacgtttagaaaatatattccttcacttaatattcaattagagaaaaacatggtgattgtaatatgttgtgcaatatttctgggtgttttaatactttttttatttctgaatcgtaagctaaggttggaaatttataataataactctagtaaagggaaaataattttatttccttcattaaaaaacttttgtttcacaatattttattattttttatttggcggtctttcaataatggctctaagtatgttattaactttaaatcctcaaaatataataggctttattggttggttggtaatgactgcaggtttctttctgttaaacatgtcatcgattattgacaaaaaaatttatgtattatctaaaactaacacggtggaaaaatgatggtttagctggatttactgcaggttctatttcggcaatacttgtatattggaccaatcaaaaaaatgaatttggaataaaagataaaaacgattggataggacataaactagacgttggtatagatgctgtagaaaaatctgcagaaaaaacagtagatggtgttgaaaatgtcatggtgaagcttcaaaaagtatttctaatcatataagccctaagaaatggagctggtaaatgttgctatgcgaatctaaaatcatcaataaaaacccaaaatatagaattattaaatataatgatgaatacttaatggtcgatataataagcacttggattagtttattttttccttttattaattggttcatcccaaaagaatacgtcaaaattagtagagaagagtttgaaaacttaaatattgttaaacctgctaaaaagaatgttttttggccagttgcaggtagctctgctttgctgggagttgcattaagaaaatatacacatttacttgacattcaacttgataaaaaattagttattgccatatgttgcatcacatttatagggattttaatattttatgtacgcctaattaaaaaatcatctttaaatatttataatactaaaaataaaaggtcaaaaatttttttaatacctacactaaaaaatgtttgtttcacattatttggatatattttatttggcggattgactatgctattcctagatgcactattatcaatgagttatcaaaacataatagtatattttgtttggattgcagttataatgggtttttttctagttaatatagctttaattatagataaaaacattcatgtcatacttaaaaaccaatagaaattaccaaattaaatttgtaatggctttaatattgtcgttcttaaatgtttttcaatttctgattcaaaagtacatgtaatttaaaggtcaacgagcaatcgcgctatatgcatatcaatttaagcaatacttattttaactgagttttatataacgttttcctattacaccgcttaaattcaagctctaattctaacatttggaagttgtattaaatcatgatagtgtgatagtggaaaagttataaagataaggagctgggtctaatgaagcaatttgtaaacttaggtaaatctgatgttgaagtgtttccaatcgcacttgggacgaacgcagtaggtgggcataatttatatccgaacttagatgaagaacaaggaaaagatgttgttcgtcaagccattaatcatggtattaatttattagatacggcatatatttatgggccagaacgatcagaagaattggttggagaagttgttaaagaatatccgcgagagcaaattaaaattgctacgaaagggtctcatgaatttgatgaaaatcaagaagtacatcagaacaatcaaccggaatatttaaaacaacaagttgagaatagtttgaaacgtctacaaactgattatatcgatttatattatattcattttccggataacaacactccgaaagatcaagcagttgcagcattacaagagcttaaggaacaagggaagattaaagcaattggtgtatcaaatttcacattagatcaacttaaagaagcaaataaagatggttacgttgatgttgtacagttagaatataatttattgcatcgcgaaaatgaggcagtattacaatattgtgttgatcaccaaatcacatttattccatatttcccattagcatccggtattttagctggaaaatatgatgagaacactaaatttagtgaccatcgtactacacgtcgtgattttaaaccaggtgtatttgaagaaaatgtgcgtcgcgtaaaagctttggaaagcatagctgcagcacatcaaacttcaattgcgaacattgtattagcattttatttaacgagaccagctatcgatgtgattattcctggtgcaaaacgtgcagaacaagtcgttgaaaatattaaagctgcagatatcgttttatcagatgatgagattcaatatatcgatgaactgtttccgattgaagactaaatgaattgtatttaatggtgatatatgtatctaatttcatcatgaattagccccgtatcacaaacgacgttatataaggcatgacgaaatttcgtcaaatttatataaaagttgtaagcgttttactattcggtaggcaaagcttatgatagtataattaggtaacgaaaaacacagatatttattaatcaaaagtgaggttaggctaaaatgattactgttttgtttggtgggagtagaccaaacggtaatactgcacaattaacaaaattcgctttgcaagatttagagtatcaatggattgacgtgacacaacatcagtttaaaccgatacgtgacgtgagacatacagcagagactattacttcatatgacgatgactatttgccgattctagataaaatattggctagtgatacaattatttttgcatcaccagtgtattggtatagcatttcagcaccattgaaagcatttatcgaacattggtcagaaacattacaagataaacgatatcctaattttaaggcacaaatggccgaaaaggattttagagttattttagttggtggagattgtccaaaaataaaagcgaagccagcaattacgcaaatgaaatatagtttagactttttaggtgccactttaaatggttatattattggaactgctgaaaagcctggtgacatcatgaaagacaactatgccttagcacgtgcaactgagtggaatagtatattgcaataagacatacctcatactaaacgaagtgattttttgcttcgttattttttatttttaattttaacggaaaatataaatatataaattgaatagacaatcattgtttattaagtattgagcaagttgtggtataatgccgttattaaaacttgttaataaggggagaaagtcatgttcaaggtaagacaagcaactgaaaaagatgttgttcaaattagagatgtcgcaactaaagcttggtttaatacatacttaaatatatacgctgcgacaacagttaatcacttgttagaagcttcatataatgaacatcatttaaagaaaagacttcaagaacaattattcttagtcgttgaagaaggtaatgacatcgttggctttgctaactttatttacggtgaagaattatatttatcagctcattatgttaaaccagaatcgcaacatacaggttatggtacagcattgttaaatgaaggattatcacgttttgaagataaatttgaaggtgtttacttagaagtagataataaaaatgaagaagcagtagcttactataaagagcaaggttttacaatcttacgctcttatgagccagaaatgtatggcgaaaagttagacttagcacttatgtacaaagcattttaagtaaattaaatattatattaaacgaaaaggaggggaataatgactaacgcatatgtagatttaaaattagtagaagaaaaagtttttaaagacccgatacatcgatatattcatgttgaagatcaattgatatgggatttaattaaaactaaggaattccaaaggttacgtcgaattagacaactaggaacactgtacctatcttttcacacagcagaacatagtcgctttggacattctttaggtgtgtatgaaatagttagacgattaattgatgagtcatttattggtcatgatgcatgggacaataaagatagaccgttggcattatgtgctgcattattacatgatttaggacatggtccattttcacatagttttgaaaaaatatttaatacagaccatgaagcatacacacaagcgattattactggagatactgaggtgaatgctgtattacgtaaagtggcgcctgagtttccaagagaagttgcggaagtaattaataaaacgcatcataataaattggtcatttcgatgatttcgtcacaaatcgatgcggatagaatggattatttacaacgtgatgcgtatttcacaggtgtatcatatggtgcttttgatatggagcgtattttaagattaatgcgaccttctaaagatgaagtactaatcaaagaaagtggtatgcatgcagttgaaaactttattatgagtcgttatcaaatgtattggcaaatttacttccacccagttagtcgtggtggagaagtgctgcttaataattgtttgaaacgcgcaaaacagctttataatgaaggctatgaatttaagttgcatccacatgattttattccattttttgaagagacagttacgattgaacaatatgttgaactcgatgaagcggtagttacgtattatttggaaaaatggacaaaagaagatgatgctattttaagtgatttagcaagtcgatttattaatcgagacttatttaaatatattccatttgatggctcaattattacaatatcagaactgcaagaactgtttgaagcaggtggtattaatccagattattattttgtgagtgaagcattttctgatttgccatatgactatgatcgaccggggtcaaatcgcaaaccgattcatttattaagacaagatggtacgattagagaaataagcaatcaatcattagtcattcatagtattacaggcattaatcgccaagactataaattatattatcctagagaaatggttgcaaagattaaagataagacaattagagaagctattgaaaatttgattaatgagcttaattaaacagggctaaaattgttatcgttaaatatggaggttatatcattgtctgagaaaaaaggctttaattttaatatcataaaaaatgaccctctagatggtcataaaggtacaaatattggttcaattagcttagacaatattgcaccagtttttatcgatgttgctaacaaagaagcatttattgatattggaggcatgcatgctcgtgccaaagttgaaaaaggtgtgaaatggattactgataaagctgctgttgaaggcgatgaagctaaagaatattggttgtgttgggtaacaacagaacgtaatgaacaaggaccatattacgctggtttaacagcgtgctatttattagtgaataaagcaattcgtcgtggttataaaagtatgcctgaacatgttaatatgatggataaatcaatgaaacatcatattatcatagatcaaattggtgacgagaataaagctattttaaaagactttttaatgaaccatgatgaaggtatgtggaagcattcttctgatgctttacatcaagcatttaattaaatattagaaactaaaatttcccaattaatctataaagatatgattcatttctcaatgacgacgtaaatcgtgaggtgaaaataatgtcttagattgattgggagtttttttaatttttttgaaattaaattaatctgtagttaataaaaaatttgaataactgacacatttttttgatcatagctatatactttgtgaattaattcacattataataagagtgaagataagagtattataaattatctttaaataaatatatgtgaagtaaaaattacacgttagcatatcgattatgtcatttcttttaacatattaactagggaaacgttaaaagttaacggttgatatctaactaaaaacaaggtcacagtagtatgttttaatctggcgtctattacaaataaaaattacatctataattattcgttttcttttttgaaagtaatagccaattaatatcatacatactggagtgactataaggaggacattattatgagagcagcagttgtaacgaaagatcacaaagtaagtattgaggacaaaaagttaagagctttaaaacctggtgaagcgttggtacaaacggaatattgtggcgtttgtcataccgatttacatgttaagaatgctgattttggtgatgttacaggcgttactttaggtcatgaaggtattggtaaagtcatcgaagttgcggaagatgtagaatcattaaaaattggagaccgtgtgtctatcgcttggatgttcgaaagctgtggaagatgtgaatattgtacaacaggtcgtgaaacactttgccgtagtgtgaaaaatgctggttatacagtagatggtgcaatggctgaacaagttattgttactgcagactatgctgtgaaagtacctgaaaaattagatccagcagcagcgtcttctattacatgcgcaggtgtgacaacttataaagctgtaaaagtaagtaatgtaaaacctggacaatggttaggtgtttttggtataggtggtttaggtaacctagctttacaatatgctaaaaacgttatgggggctaaaattgttgccttcgacatcaatgatgataaattagcattcgcgaaagaattaggtgctgatgctattattaattctaaagatgttgatccagttgcagaagttatgaaattaactgataacaaaggattagatgcaacagtggtaacttcagttgctaagacgccatttaaccaagcggttgatgttgtaaaagctggtgcaagagttgttgccgttggtttacctgttgataaaatgaacttagatatcccaagattagtgcttgatggtattgaagtagtaggttcacttgttggtacaagacaagacttacgtgaagcgtttgaatttgctgctgaaaataaagtaacacctaaagttcaattaagaaaattagaagaaatcaatgatatttttgaagaaatggaaaatggtactataactggtagaatggttattaaattttaaaaatatcaactgactatatagataaagaaggtagtgctctgaacactatcattataatcaaacacgaggttttcatgaaagatagtgaaaatctcgtgttttttggttttgaggtgttgtttgtattttataaaatggcttacatatatgaagcgttgattaagtatggaattgttaattaattgaacctatttagctttaagaaggcataacaagatgaccttattttatgctataatatttctattatgcgaagattaaggtgagtagtaaattggataaaaaagtaagtattcaaacaaagcaagtgttgaaacagcacaacgaaaaagaaaaatttgaatttactactgaaggaacttggcaacaaaggcaatctaactttattcggtatgtagaacaaattgaggatgcaacagttaatgttacaataaaagtggatgatgatagcgttaagttgattcgtaaaggcgacattaatatgaatttgcattttgttgaaggacaaacgacaacaactttttacgatatatcggctggacgaattccactagaagttaaaacattacgcattttacatttcgtaagtggagacggtggcaagctaaagattcattatgaattatatcaagataatgaaaaaatgggttcttatcaatatgaaattaactataaggagataggcgaatgaatattattgatcaagtgaaacaaacattagtagaagaaattgcagcaagtattaacaaagcaggattagcagatgagattcctgatattaaaattgaagttcctaaagatacaaaaaatggagattatgctactaatattgcgatggtactgactaagattgcaaagcgtaatcctcgtgaaattgctcaagcgattgttgataacttagatactgaaaaagcacatgtaaaacaaattgacattgctggtccaggattcattaatttttacttagataatcagtatttaacagcaattattcctgaagcaattgaaaaaggtgatcaatttggacatgtaaatgaatcaaaaggtcaaaatgtattgcttgagtatgtttcagctaaccctacaggagatttacatattggtcatgctagaaatgcagcagttggtgatgctttagctaatattttaactgcagctggctataatgtaacacgtgaatattatattaatgatgctggtaatcaaattactaacttagcgcgttcgattgaaacacgtttctttgaagctttaggtgacaatagttattcaatgccagaagatggctataatggaaaagatattattgaaataggtaaagatttagcagagaaacaccctgaaattaaagattattctgaagaagcacgtttgaaagaatttagaaaattaggcgtagaatacgaaatggctaaattgaaaaatgatttagcagagttcaatacgcattttgataattggtttagtgaaacatctttatatgaaaaaggagaaattcttgaagttttagcaaaaatgaaagaattaggttatacgtatgaagctgatggcgctacatggttacgtacaactgattttaaagacgacaaagacagagtattaattaaaaatgacggtacatatacgtatttcttaccagatattgcgtaccacttcgataaagtaaaacgtggtaatgacattttaatcgatttatttggtgctgatcatcatggttatattaatcgtttgaaagcatctcttgaaacgtttggtgtagatagtaatcgtttagaaattcaaatcatgcaaatggttcgtttaatggaaaatggtaaagaagtgaagatgagtaaacgtactggtaatgcgattacattaagagaaattatggacgaagttggcgttgacgctgcacgttatttcttaactatgcgtagtcctgatagtcactttgattttgatatggaattagcgaaagagcaatctcaagacaatccagtttactatgctcaatatgcacatgcgcgtatttgttcaattttaaaacaagcgaaagagcaaggtattgaagtgactgctgcgaatgattttacaacgattactaatgaaaaagcgattgaattgttgaaaaaagtagctgatttcgaacctacaattgaaagtgctgctgagcatagatcggcacatagaattactaattatattcaagatttagcttctcatttccataaattctataatgctgaaaaagtgttaacagatgatattgaaaaaacaaaagcacatgttgctatgattgaagcggtcagaattacattgaaaaatgcattggcaatggtcggtgtaagcgcacctgaatcaatgtaagaacatttatatacactccaacgtagagtttctcgaaagatactttgtgttggagtgttttttttaggtatgtgacatattggggaatgcttagtatgtgaataaggttaagaggaacacagttggatgctctgcacaactgcataagagagcctgagacataaatcaatgttctatgctctacaaagttataatggcagtagttgactgaacgaaaattcgcttgtaacaagcttttttcaattctagtcaaccttgccggcggggccccaacaaagagaaattggattcccaatttctacagacaatgcaagttggggtgggacgacgaaataaattttacgataatatcatttctgtcccactccctctaaaatggagggtgtaaatgttaggaactgatgaattatataaagttttatatgaacatctcggaccacaattttggtggcctgctgataatgacattgaaatgatgttaggtgcaattttagttcaaaatactagatggcgaaatgcagaaattgcattgaatcagattaaagaacatacgcattttaatccaaatcatatattagaactacctattgaaacgttacaatcattgatacattcaagtggcttttataaaagtaaatcactgacgattaaaacattattaacatggttagcacgacatcatttcaattatcaagagattaatgagcgatataaaggtggattaagaaaagaattattatctttgaaaggtattggaagtgaaacagcagatgtcttacttgtttatatattcggacgtattgaatttattccagatagctatacaagaaaaatatatgataaattaggatatgaaaacactaaaaattatgatcaattaaaaaaagtagtcacattaccaaatcattttacaaatcaagatgctaatgaatttcatgctctgttagatgtatttggtaaacattactttagagacaaagatataaagaattatgattttttagaaccttactttaaaaagtaaacgctgtgaagttagatagatgagtttatatgaaatataaaaaataatttactattttcttttagtatgtggacttatataataaatagaagcatataaagaaaaaaacagttgtttgtttgtgcagcaactgcataagagcccctaatcgctaaagctcaaggggagtaaaggaatacagttgtttgtgcagcaactgcataaaagcctctaatcactaaaggtgaagaggaacgcagttggatgctaaggcacaactgcataaaagcctctaatcgctaaagatgaagaggaacgcagttggatgctaccgcacaactgcataaatccctctaatcgctaaagcgaaaagtgggattaaaaaggagatgtgatagtgtgaagaaatcgttaattgcttttattttgatttttatgcttgtcctgagtggctgtggtatgaaagataatgataaacaaggtagcaatgataatggctcgtctaaatcgccgtaccatagaattgtttcgttaatgcctagtaatactgaaattttatatgaattaggattaggtaaatacatagttggtgtttcaacggttgatgattatccaaaagatgtgaaaaagggtaagaaacaatttgatgctttgaatctaaataaagaggaacttttaaaggcaaagccagatctaattcttgcgcatgagtcgcaaaaggcaactgctaataaagtattgtcatcattagagaaacaaggcatcaaagtagtgtatgttaaagatgcacaatcaattgatgaaacttacaacacatttaagcaaattgggaaattaacgcatcatgataagcaggctgaacaacttgttgaggaaactaaagataatatcgataaagtcatagattcaattcctgctcatcataaaaaatcaaaagtatttattgaggtttcatcaaagcctgaaatatatacagcagggaagcatacattttttaatgatatgttagaaaaattagaagcccaaaatgtgtatagtgacattaatggttggaaccctgtaacgaaggaaagtattattaaaaagaacccagatatattaatttcgacggaagctaagacaagatcagattatatggatatcatcaaaaaaagaggtggattcaataaaattaatgctgtcaagaatacatgtattgaagttgtaaatggtgatgaagtatcaagaccaggtccacgtattgatgaaggattaaaagaattaagagatgcaatttatagaaaataaaccattctaattatgccccttattgctacatgtaaaaaatacatgtttgagataaggggtttttaaaatatatttagtgaatgatagcaacgcgagtatgtgattgctataatgaatgtaattatcgatgaaagaaaagagaatgctatgacatttaataaagtattattgagctggatagtcatattgattataacaactagcatatatctattttggcagttgggcgatatcaatgatgtatttaaccagtctattttaatcaatgttagattaccgagattattagaagcattgttgacaggtatgatattaactgttgcaggccttatatttcaaacagttttaaataatgcattggcagatagctttacattaggattggcaagcggcgctacatttggttcaggattagcattatttttaggtttaacaacgttatggattcctgtattttcaataacatttagtttgataacattaataactgtattagtcattacgtcggtattgagccaaggctatccagttagaatcttaatattaagtggtttaatgattggtgcgttattcaattcacttctatattttttgattttattaaaacctcgcaaattaaatacaattgccaattatctgtttggtggttttggtgatgcagaatactcaaatgtatctataatagcaatcacatttatcattgcattgtttggtatatttatcattcttaatcaactaaagttattgcaattaggagaactaaaaagtcagtcactaggcttaaatgttcaattgattacatatatcgcgttatgtatagcttctatgataacggcgataaatgtcgcatatgttggcatcattggattcattggtatggtgataccgcaactcattagaaaatggcagtggaaacaatcattaggaagacaattggctttaaatattgtaactggaggacaaataatggttatggcagattttattggtagccatatattgtcaccagtacaaataccggcaagtattatcattgcattaattggtataccagtgttattttacatgctaatatctcagtcgaaacggttacactagcacacgacatttgctaaaataaaaataactataaacataaagagggcataagcgatggatttgaatcaaattaaagcagttgtatttgatttagaaggtacgttgttggacagagttaaatctcgagagaaatttatcgaagagcaatatgaacgatttcatgactacttaattcatgttcaactggcagattttaaaaaagcatttattgagctagatgacgatgaagataatgataaacctgatttatataaagaaatcattaaacgtttccatgtagataggttaacttggaaagacttatttaatgattttgaaatgcatttttatcgttatgtatttccttattacgatactttgtatacactagaaaagctatcgcaaaaaggctttcaaattggtgttatcgcaaatggtaaatctaagattaaacaatttcgattacattcacttggtttgatgcatgttattaattatttatcaacatcagaaacagttggttttcgtaaaccacatcctaaaatttttgaagatatgattgatcaactaggggtattacctgagcaaattatgtatgttggcgatgatgcgttaaatgatgtagctccagcacgagctatgggcatggttagtgtatggtataaacaagaagatgctgaaattgaaccactcgaagaagaagttgattttacaattacaacagtggaagaattattaaccattttaccaataaaaaatgataataaaggagaaaattatggatctatttactagaaaagatggaacatcgatacattacagtacattaggtgaaggctatcctatcgtattgattcatactgtacttgataattattctgtgtttaataaattagcagcagaattagcaaaatcatttcaagttgtgttaattgatttacgtggacatggctattctgataaacctcgtcacattgaaataaaagatttttctgatgacattgttgaattacttaaatatttatatattgaagaagttgcatttgtatgccatgaaatgggtggaatcattggtgcggatatttcagtacgttatcctgaatttacatcatcacttacgttggtaaatccaacatctattgaaggtgaattaccggaagaacgtttatttagaaaatatgcccatattattcgaaactgggatcctgaaaaacaagataaatttttaaataagcgtaagtattatcgtccgagaaaaatgaatcgattcctcaaacatgtcgtagatacaaatgaaatatcaactaaagaagaaattcaagcagttaaagaggtattcaaaaacgctgatatttctcaaacttatagaaatgtcgtagtaccgacaaaaattattgcaggagaattcggtgaaagaacaacaagattagaagctaaagaagtagctgatttaatccaaaatgcggactttgaagtatatcaagaatcaagtgcattcccatttgttgaagagcaagaaagattcgtcgaagatacagctgcatttatcaacaaacatcacgatgaaaagcatgtttaatttttagtgataagtgaaatataaaagtagtaattattatttgtaatataattgtaatatgactgttgttttagaaatgattgttgtataatggttgtgagcacaagacgatataaataaaaggagagagtgcttatgaaaaagctactaacggcaagtataattgcatgttctgttgtaatgggagtaggcttagtgaacactagtgccgaagcagcaagtggcaactctattgatactgttaaacaattaattaagggtgatcagtcattagaaaatgtgaaaattggcgaatctattaaagatgttttaactaagtacaaaaatccgatgtattcttacaatgaagatggaactgaacattattacgaattccatactaaaaaaggtatgttattagtaactactgatggtaagaaaaacaatggtaaagtaactcatatttcaatgatgtataatgatgctaatggtccaacatatcaagctgttaaaaattatgttggcaaagcagtaacacatacggaatatagcaaagttgctggtaattttggatatattgaaaaaggcaaaacgacttatcaatttgcctcagcaccaaaagataaaaacataaaattatatcgtattgatttggaaaaataataattaaattaatcgtgcttaaccgacaagttaaatcgcaatacttgtcggttattttattacatggcataatacagtgaatattaatttttatgatttgcgaaggggaaattaaaccaatacaataaataaagatgtttcattttaaaggagtactaccaatgcgtattaacgataaaattttactagaaaatatagaagattactttaatcataaaggtttatcaccgcatttgattgatgatattaaagagaaagtaattactgatataaaaaattctgaaaagaaagatcaagattatattgaatataaaagaaaatctccagcacaaatcatattaatgattcaaaggaatttgtttgctttacaaatgaatccagttattttctttattataaacttcattctcatatcctatttatatgataaacagtatgttcagtttcaagctattactggaatgagtctattttattgtttagtgatttttccaatgactattgttgtatacctaagggtgtctcaaaagaattacttgcgtagtaataaaatagaaatgattatgggtacaattatcgctatcatatccttgttattaattatattacaagcatttaatattacttggggcgttataccaattacaaattttggacatcaatttttctttttcattggtattattttagtaattgccggcatattttataagcgacttgagttttcgggaatcgggttattattttgtcaaaaaaccgtcgatgcaatgattcataatccacaatcagcccagattttttcattaattatatggatattattagtagttctagttatatatttcacaattagattatcttcacgtacaagattataaatatgataaaactattcacttgattaattgtattaattgagatgaatagtttttttattgttggaataacttttggtaatttataaataatttaaaaaaattgtttataaaatggaagcgtatatagaatgaaggttgggtatatagtttattgagggaggtgtcacaatgaataaagtcacaattaatcctcaaatccaattaacttatcaaattgaaggtaaaggggatcctataatattacttcatggattggatggtaatttagctggatttgaagatttgcaacatcaactagcatcatcatataaagtacttacttacgatttaagaggtcatggcaagtcttctaaaagtgaatcatacgatttaaacgatcacgttgaggatttaaaaattctaatggagaagttaaatattcatgaggcacatattctaggacatgatttaggtggggtagttgctaagttatttacagataaatatgcttatcgtgtaaaatcattaactaccattgcatcgaagaaagatgacttaatacacagctttactcaattgttaatacaatatcaagatgatatagcgggttttaataagtctgaagcgtatattcttttattttctaaattgtttagaaatcaagagaagacgatgaaatggtatcaaaaacaaagaatatatagcattaagtctgaggatgatagtgcggtggcaattcgttcattaattttgcataaagatgaacctatgtatttaaaaaaacgtacatgtgtacctactttgttaattaatggggaacatgatcctttgattaaagataagaatcattttaaattggaagcgcattttttaaatgttacgaaaaaaatcttcgaacattcaggacatgcaccgcatattgaagaaccagaagcatttatgaattattatttaaaatttttaaaaagcgtatcataatatgtgatatataaacctagggcataaagtccttaggcaatgtgaaaaagctgattactattcattatttgatagaaatcagctttttttgaaatgtatttgatatatactgctcgttatgcggctatcttccttatattaagtgccattagtgcaaaacctcttaacaattaggtaaaaagagcataaaaaaaggaagtttaatagaatgtatcatctatcaaacttcaccaaattgcgctaaacaaaattatagttcaatttcgttgtttgcttcagtgattcgtttatttactcgactcaataatgattcgatttttttacgttgttgtgcattaacaagaattaatacagttctttcatcatgctcattacgttttttatcgaagtaatcttcttgagataaaattttaactgctttaacaacttgtggttgtttgtagtttaaatgattaataatatctttaagatagtattctttctctttgttttcgctgatgtatgtcaatacagcgaattcttcaaagctaattgaaaattcctttttaattaaactttttaatttgtcagcataagtgaccattgataacaactcaaagcaatcattgatttttgtaattgccatgtttaaaacctccctatttgatgcatcttgctcgatacatttgcccgataatatattgatatctaatctttatttattatagatatcttagtcataattttgcattaaataagttttattaaatatatttaatgctctattatttagttaattataactaattaaaaatgagaagtaaacaaaaaagtgtttataaaacaaattattcattagacacagtgattgtatttctgggttagcatttggtttagtcaaaaatatcagcattttttataatttaccttaatttaatcgacaatacaaggtaatttatttaatgaaacgatttagcgcaattaaatgtttcgatattcaatgtgtgtctaaagagattctttgttatagcttaactcttccaagttaacttcttctactatttatacccatttttcagaattttatcactaaaaatgaaaaatttttataatttttttaatttagtaattctcagtgcagttttaatgataagaaaaacacattaatttagtgattaaaaccaatctatagcacgttaaagtgtctatacgttattccgattgataacgggtaacaaataatagaaagtacgataattgatcatgcattaaagcacttttatttttcaaactcgactcaatgaattataaaaagttgtgcattttgacttatttttaattaattgaataaccaactatgaaatattagcacgaataacataatttttgctattaatttggtgtaaattattaaaaaataacattaatttaggtcttaagaatgagttgactatcgaatttgctaaattaaaatttgttgtgtcaaagcatactacccaaatcaacgcttttctaaagatttttagaccacaaaaaaatagcttatcacttttaaaaataattacaagttaaaatgataagctaaaagttaatttaaaataatcttaaaagtataatgcctgtcaaaatacataatagaccaatagtttttctggatgtcattgctattttaggtgaaccaaataatccaaagtgatctatcaatatgcccattagaatctggccaaacatcccaataagtgttgttaatgctgcacccatatgaggcattaagataatgttagctgttacaaaagccatgccaagtataccgccagtaaaatagataggctttaatttaccgaattttaaatgacttgtttttagttttaaagaacgattaaaaatagcggttaaaatcaatagcgctattgacccaattgtaaatgatactaatgatgcaaaggctggtgaatgagtatgactagctaaagcactattaattgtcgtttgaataggtggaaagaaaccaaaaataaatcctaatagaagccaaaacagtaaatacttttgatcagttagtaataaattattcttgttaaattgattcattatgacgatgccgacaatgagtaacaatactccaattgctttaattaaattaaaatcatgaattgtagcgccaaataatccaaatgtatcaataatgacacccataataatttgacccgcaactgttgcaattacagttaatgttgcacctaattttggcaataacaataaattgccagttaaaaagctaaccccaagcaaaccaccgactacccatgtgtagttaaatgattgattattgtaaaagtgaatagtaaatacttctggattgataatgatatttaaaataattaaacaaattgttccaactgaaaatgaaatgaatgaagtatagaaaggcgatttagtatacagtgatagtcttgaattgacagatgtttggataggaataagcattccaactaggacaccaatgatatagaaaagaagcatatgaataaagtctcactttccaaagttaataataaaatcatatatttacattatcattatagagaaaatatacaactcatttacaataatgttgaaaaaaacaggacattattacaacaaaatcaccctagacaatcatgatgaaagtctagggtgttagtatttatactaaattaattgcgctttctttatatctatttcttatcttcaaataaaacagttgttgttttatcaataatttgagcagaatgtactttggtgatagtaccactatttgactttataatatttaaatctactaatgcattcatactatcacgtgcaacttgctcggtcactacgttgtttaattgtggtaattgcagttttacaggcttgtctagtgaagatttaaaacttaattcaagtgttttagtcatgaatatgtcctcctgattaaattgataaagatttgatgagttcgatattgctatatgtttctccagtaagtcgctcaataagtttgctgaatgttttaatttggtcgtttgatgcatcagggttaatgttagcgaatcgacgcttaaattctgtttgtttgccgttagcgtctactttagtaaatgataatacaatagtgatgtggtttattttactcatattttaaaacctcctttcacactatatatcgaaacaaaataataaaatggctaattttattttctatgtttaaaatctataaaaaaggcaatagatatatgtaactaaaatataatatagctatgattaagacacttaaagcaaggggaggttgagtaatgaataaagtagaagcgattaaatttaatgatgatattgttaaaatgtatgaagcgctcaagataaaatctgaacgtgactatttattctttaagttagctatacatagtggattgaaagtatcagaattattaacaattacagtctctcaagttaagagactaattgaaaagtgtacgttatcagaaatgtgtaaagcacattttcattcgttgattaaaattaggttaccagaaacattatcgaaagaactacttcaatatatagaggacaggagtctttcgaatgaagacgttctttttcaatcactacgaacaaatcaagtattatctagacagcaagcatatcgaataattcaccaagcatcaattgaagctggtatagataatgtaggactaacgacattgcgtaagacatttgcatatcatgcttatcaaaaaggtatacctataccagtcattcaaaagtatttagggcatcaatctgctattgaaacactaaattttatcggtttagaaaatgagtgtgaacatagtatttatatttcattacaattatagaaacaaaggaggctaataatgagtttggtttatttattaattgctatacttgtgattatggcgatgatacttctaatgtctaaacgtagagcattggctaaatatgccgggtacatagcgttggttgcacctgtaatttcatctatctattttttgattcaaataccatcagtagctaaactgcaatatctttctacctctattccatggattaagacattagatattaatttagatttacgtttagatggtttaagtttaatgttttctcttattatttcacttattggaattgcagtattcttctatgcaactcaatatttatcctctcgaaaagacaatttaccaaggttttatttttatttaacgttatttatgttcagtatgattggtattgtattatcagacaatacgatattgatgtacattttttgggaattaacgagtgtatcatcatttttattgatttcatattggtataacaatggtgacagtcaatttggtgcgattcaatcatttatgattacagtatttggtggattggcgttattagttggttttattatgctgtatatcatgacaggaacgaataacatcacagagatattaggacaagcagatcatattaagaatcatggattgtttatccctatgatttttatgtttttattaggtgcatttacaaaatcagcacaatttccatttcatatttggctacctagagcaatggctgcacctacacctgtaagtgcttatttacattcagccacgatggtaaaagctggtatctttttattacttcgatttacaccattattaggtcttagcaatatgtacgtatatatcgttacgtttgttggtttaataacaatgttatttggttcaattacagctttaaaacaatgggatttaaaaggtatcctagcgtactctacaatcagtcaacttgggatgattatggctatggtgggtataggtggcggatatgctcaacaccaacaagacgcaatagcatctatttatgtatttgtattatttggtgcgctatttcatctaatgaatcatgccatctttaaatgtgcgcttttcatgggagtaggtattttagatcatgaagcaggttcaagggatatacgaattttaagtggaatgcgtcaactatttcctaaaatgaatctagtcatgacgatagcggctctatctatggctggagtaccatttttaaatggatttttaagtaaagaaatgtttttagatgcattaacacaaactggacaattatccgaatttagtttgatttcaatgatagctatcgtgtttgttggtgttattgcgagtgtttttacattcacatatgcactatacatggtaaaagaagtattttggacaaaatatgattctaaggtttttactaaaaaaaatatccacgaaccatggttgtttagtttaccatctcttatattaatggtgctagtacctgtaatcttttttgtaccaaatatatttgggaaggggattatcgttctagcattaagagctgtatcaggtggtaatcatcaaattgatcaattggcaccacatgtttcgcaatggcatggatttaacataccgcttcttttaaccatcatcattattttattgggtagtgtactagcaatcaaagtagattggaaaaaagtgttcacaggtaaaattagacagatttcagtttcaaaaagctatgagatggtatatcgacattttgaaaagtttgctacgaagcgatttaaacgtgttatgcaagatcgtttaaaccaatacattattatgaccttaggcatatttatgattatcattggatatggttatattcgaattggacttcctaaagtacatcagttacatgtttctgaatttggggcattagaaattatattagcaatcgtaactgtcacaattggtatttctttaatttttatacgtcaacgactgacaatggtcattttaaatggagtcatcggatttgttgtgaccttattctttatagcaatgaaagcccctgatctagcattgactcagctagtagttgaaacaataacgacgatactatttattgtcagtttttcaagattaccaaacgtgccaagatctaacgctaacaaaaaaagagaaataattaaaatttctgtatcactcttgatggcacttattgttgtatcattaatttttattacacaacaaacagatggtttatcatcaatatcagacttttatttaaaagctgacaaactaacaggtggtaaaaatattgtaaatgcgatacttggtgactttagagcattagatacattatttgaaggattagtgttaattattactgggctaggtatttacacattattaaattatcaagatcggaggggacaagatgaaagagaatgatgtcgtgttaagaacggtcacgaaacttgttgtatttattttattgactttcggattctatgtcttcttcgcaggtcataataatcctggtggtgggtttattggtggtttaatatttagttcagcgtttattttaatgtttctggcttttaatgttgaagaggttttagaaagtttaccgattgattttagaattttaatgattattggagcattggtatcatctattactgcgataatacctatgttttttggaaaaccatttttgtctcaatatgaaacaacttggatacttccaattttaggacaaattcatgtaagtacaataacactttttgaattaggtattttattctcagttgttggtgttattgtcacagtgatgttgtcgcttagcggaggtcgatcatgaatttaatattattactagttataggatttttagtgtttataggaacatatatgattttatcaatcaatttaattcgtattgtaatcggaatttcaatatatactcatgctggtaatctcattattatgagtatgggaacgtatggttctagtagatcagaaccactaataactggtggaaaccaattgtttgttgatcccttgttacaagctattgtactaactgcaatagttatagggtttgggatgactgcgtttttacttgtacttgtttatagaacttataaagtaacaaaagaagatgaaattgaaggcctaaggggggaagatgatgctaagtaacttattgattttaccaatgttattaccattcctttgtgccttaatccttgtatttttaaaaaataatgatcgtatttctaaatatttatacttaggtacaatgactatcaccacaattatttcattaatgctattaatttatgttcagcgtcaccgtccaattacgctagactttggaggatggtcagcgccctttggtatacagtttttaggagattctttaagtttaattatggttacaaccgcttcgtttgtgattactttaattatggcatacggatttgggcgtggcgaacataaagcaaatcgttatcacttgccatcgttcatattatttttaagtgttggcgtgataggctcttttctaacatcagatttatttaatttatacgtcatgtttgaaattatgttactagcgtcatttgtactcattacacttggacaatctgtagaacaattacgtgctgcaattatttatgttgtcttgaatattattggttcatggctattcttattaggtataggtttactttataaaacagtaggtacattaaacttttcacatattgcaatgcgtttgaatgacatgggagataatcgcactgttacaatgatttcattaatcttcttagtcgcatttagtgcgaaagcagcgctggtcctttttatgtggctacccaaagcctacgctgtgttaaatactgagcttgcagcattatttgcagcgttaatgaccaaagtaggggcctatgcattaattcgattcttcactttactatttgatcaacataatgatctcatacatccattgctagcaactatggctgctataactatggtcatcggcgctataggtgtcattgcttataaagatattaaaaagattgcagcttaccaagtcataatctcaataggatttatcattttaggtttaggaacaaacacgtttgcaggtattaatggtgcaatattttatttggtaaatgacattgttgtaaaaacattgctattttttattattggtagtttagtttacattacaggctatcgacaatatcaatatttgaatggcttagctaaaaaagaacctttatttggagttgcgtttattataatgatttttgctattggcggcgtgcctccatttagtggctttccggggaaagtacttattttccaaggtgcattgcaaaatggcaattatattggactagcgttaatgattattactagtctaattgcaatgtacagtttatttaggatacttttttatatgtattttggagataaagatggggaggaagttaattttaagaaaatcccgctatatcgaaaaagaattttaagtattttagtagttgtggttatcgcaatcggaattgctgcacctgttgtgttaaatgttacaagtgatgcaactgagttgaacacgagtgatcaattatatcaaaaacttgtaaatccgcatttgaaaggagaggactaaatgaatcaaatagttttaaatattatcattgcattcttatgggtattatttcaagatgaagatcattttaaattctcgactttcttttctggatatctaattggtttaattgtcatttatatattacacaggtttttcagcgatgatttttatgttagaaaaatatgggtagctattaaatttttaggtgtttatttatatcaattaataacatctagcattagcacgattaattatattctttttaaaacaaaagatatgaaccctggattactttcatatgaaacaagactaacaagtgattggtcaataacatttttaacaattttaattattataactccagggtctacagtaatacgaatttctcaagactctaaaaagttttttattcatagtatcgacgtgtcagaaaaagaaaaagatagtttgttaagaagtattaagcattatgaagacttaatattggaggtgtcgcgatgatacaaacaataacacatattatgattattagttcactcattatttttggaattgcattaatcatctgtttatttagattaatcaagggacctacaacagcagatcgtgtcgttacatttgatacaacaagtgctgtcgtaatgtcaattgtgggtgtgttaagtgtacttatgggcaccgtttctttcttagattcaatcatgctcattgccattatatcttttgtaagttctgtttcaatatcacgctttattggtggggggcatgtgtttaatggaaataacaaaagaaatctttagtcttattgctgctgtgatgttgttgttaggtagttttattgctcttattagtgcaataggtatcgtgaaattccaagatgttttcttaagaagtcacgctgcgacaaaaagttcaactttatccgtgttattaactttaatcggtgtattaatttattttattgtgaatacaggatttttcagtgtgcgtttattactgtcacttgtttttattaatttaacttcaccagtcggcatgcacttagtcgctcgcgctgcttatcgcaacggcgcttatatgtatcgaaaaaatgatgctcacacacatgcatcaatattattaagttcaaatgaacaaaactctacagaagcattacaattacgtgctgaaaaacgagaagagcatcgtaagaaatggtatcaaaacgattgaagtgttggctaaattgttaagcataacaatgcttttgaaaatctgttttcaaaattaatcattaaaagagtactttgaaattggttagtcgattttaaggtgctcattttttgtattataagttaatgttgttatgtgaaagcaagttgtttatttatacaaacaattagtgataaaataaaattaaataattgcaaatttaagtactgcaatcgtagacatatatctatattaaagtgcttttgtggtcgctaactcaatttatcctctaaagtataattacaacgagatgtgatacttaattttcaattaaacaatactttttagagaggtgaaagtttggaaatatttgaaacaattcttatatttatagctgttgtgatactaagttcgtttgtccatactttcatacctaaagtacccctagcatttatacaaattttcttgggcatgttactatttattaccccaatccctgttcaatttaattttgattctgaattgtttatggtaacaatgattgcgcctttgttatttgtagaaggtgttaatgtttctagagtccatttaaggaaatatattaagccagtgatgatgatggcattaggattagtcattactactgtgataggtgtaggtttatttattcattggatttggccagatttacctattggagcagcatttgcaattgctgccattctttgtcctactgatgcagtagcagtgcaagcaatcactaaaggaaaggtcttgccaaaaggagcaatgacaattcttgaaggtgagtcattattgaatgatgctgctggtattatttcatttaaaatagctgttggagtattagttacaggtgctttttcacttgttgatgctgttcagttgtttttaattgcatcaattggtggcgcagtggttggtttacttataggtatggcattagtaaggttccgattaacattgatgcgtcgaggatatgaaaacattaatatgtttacaattattcaattgttaacaccatttgttacgtatttaattgctgaattgtttcacgcatcaggaatcattgcagcagtagttgcaggacttgtacatggtttcgaacgtgacagaattatgcaagtacgtacacaactgcaaatgagttacaatcatacatggaatatactaggttatgttttaaatggctttgttttttcaatattaggatttttagtacctgaagttattattaaaattatcaaaacagaaccgcacaatttaatctttttaataggcatcactattgttgttgctttagctgtctatctatttagatttgtttgggtttatgtcttatatccttatttttatttagccatcagtccattccaaaaaatgatgactaaaaatgatgatgataatccaacgactgagaaaccaccaaagcgaagtttatacgctttaattatgacgttatgtggtgtgcatggaacaatttctttagcaatcgcattaacgttaccgtattttttagcagggcatcatgcttttacgtatagaaacgacttattatttattgcatctggtatggttattattagtttggtagttgcgcaagtattattgccattattaacgaaacctgcacctaaaacagtaattggcaatatgtcgtttaaagttgctagaatttatatattagaacaagttattgattatctaaatcaaaaatctactttcgaaacaagttttaaatatggtaacgtgattaaagaatatcatgataaattagcatttttaaaaactgtagagaaagatgatgaaaactctaaagaattagaacgtctacaaaaaattgcttttaatgtagaaacaaaaacattagagtctttagtagatgaaggacaaataacgaatagtgtacttgaaaactatatgcgttatgctgaaagaacacaggtatatagacaagcatcattaataagaagaatgattgtattattacgaggtgctttattaaaacgaagagtacaaacgagagtgaactccgcatcttcacttagtgttacggataacttaatggaattaaataaaattaataaattagtccattataatgtggttagtcgtttgtctaaggaaacaacaaaagataatacacttgaagttggaatggtttgtgacggttatttaatgcgaattgaaaacttaacaccatcaaatttcttcaactcagcaagtgaagatacgattactaaaattaaattaaatgcattgagagaacaacgtcgcattttacgtgagttgattgatacagatgaagtatcagaaggtacagcgttaaaactaagagaagccatcaattatgatgaaatggttattgtagatagtatgacgtagttcctaattatgctaaaagggattgatgaaaaactgaagggcttttcatcaatcccttttattttaggggaattgaatagatagttttaaactatacgaattattaatatttgagatttaattgaaataagttttaaaaattggaggagatagattaagcgaagtcatttaaaggtgaagttaagtgtattcacaaaaaatagccacactcatatgacatcggatgagtgtggcttaaggatctatggggggaggaaaccatagatgtttactttgataggccagattaaatatcaaagtatgcgattatttatagcttgatgcaaaagtggtatgcctattaaaagttactgcacatagcttttaatattccgttcaaaggaaaggggcatacaattgaacaatctgtaatagtacttttaaccagctatgctaaaagtctagtagggagaacagttgtccaatcacataagaacctctaacttcgttagtacgattaagaaaagctttttagttagtatgtaatacaatttattgacgcgcgtgaatctcttttataagagtgtgtagggaatggcgttgtataaattgtattagaagaacttctaacgcatctctgtggttaaaagagatgaagggaacgacagtttaattaaaactgcataagaacttctagcttttctctctcgttcaaagagaagcagctgttcgcagtttaatcaaaaccacataaagcttttaactttactctttgatttaaagagtgataaatgtttacagtttaattaaaactgcataagaacttctagcttttctctttcgttcaaagagaagcagctgttcgcagtttaatcaaaaccacataaagcttttaactttactctttgatttaaagagtgacaaatgtttacagtttaattaaaactgcataagaacttctagcttttctctttcgttcaaagagaagttctaataccaccatatcgtgcgatcgggaacggtatatatattaataggagggtaatatatatttaacgcacgatatgggactattagccttcgactttgttatgttgatgtgtggcctaaaatattggagataccaatattttaggttgcatcaacatcaattcatcttacttcattaaaacacagcgtgttatttcatgcttccgtgtacagtttcaatatttgatttcatcattttgtagtaagagtcacctttagtgccttctttaccgattgaatctgtgtacacttcaccaaagatatctttcttcgtttcttcagataaactttccattgctttcttatcaacacttgtttctactaataagtgttttaatttgtgctttttaacaaactcaatagcttgtctcatttgttcaggtgtaccttgtttttcagtgttaatttcccaaatataacctggtgtaataccgtattgttttgagaagtacttgaaggcaccttcacttgtaatcatggcacgttgttcttttggaatgtcattaaatttgtctttactgtcattatttaatttttccaattgagcaatgtatttgttaccttgcttttcataatctgctttatgttttttgtcgttatcgataaatgtttgttgaattgtttttacgtatttaataccgttatctaaacttaaccatgcgtgtggatcttgtttatctttgttgccttcttcaccgtttaaatagataggtttaacatcttttgatactgcgataacttttttatcttttaatgatttaccagcctgttctaaggctttttcaaaccaaccgttaccagtctctaaatttaatccgttgtataaaataacgtcagcgtcagttaactttttaatatctttaggtttaacttcatattcatgaggatcttgaccaacaggtacaatactatgaatatcgacgttgtctccaccaacatttttagccatatcatataaaattgaattcgtcgttactacttttaatttgccatttgacttatcactgctttgtttaccaccagtaccacatgcagcaactagaagtaataaggctaataataaaggtactaattttttcatgttaaacttcctcgtttctttctattcgtaaattttgtgaaaaataatgtgatgatataaattacaaacgtacaaagtacgattgtcgcaccactaggaatgttgtaaatatagctgtaataaagtccgacaattgaacttatgacacttattaaacttgctataatcatcattgagtatagttttttactaattaaaaatgctgtagatgcaggtgtaattaataatgcaactacaagaataatacctaccgtttgaatacttgctactgttactaatgagagtaacaacatcacaaagtaatgtaataacgtcgtatttagaccactcattctactaaacgttggatcgaatgtagaaatcattaatggacgatagaaaataatgattagaataaggacgattgaaccaatcacaatagttgttaaaaatgcactatttgtgattgccagtaaattaccaaacagaatatggtacaaatctgtcgtagtgtttattaagctaataataataatccccgaagctaagaaagcggtaaaactaattccaatagcggcgtcaggtttcgttttactactagatgtgatataaccgataaaaatacttgcgatcataccagttataagtgcgcctacaaacattggaataccaaataagaatgatagggcaacaccaggtaatactgcgtgactcattgcatctcccattaatgaaagaccacgtaatacaattaaactaccaactgtaccacaaactatccctacaataattgaagttatcaatgctcgattcaagaattgatatgtaaataaatgttcgacaaactctaacatgttatattgctcctttgactagggtcactacagtcagtgctactcataaatgtttcgtttaagcgagtgacactcatagcctcttcactatcaccaaagtatcgtaatgtttgatttaatagaataatgcgatcaaagtattgctttgcttttgatagatcatggtggatgataagaataagttttccttgttgttttaagttctcgatttttgtcatgattaatttttcgctactaaaatcaattccgacaaacggctcatctagaaaataaacttcactttcggacatcaatgctcttgctactagcacacgttgtaattgtccaccacttaattctgaaatttgtcgatgacgtaaagattctaattctaaatcgcttaataactgtttgagtttatcccttgctgatttattaggtcgtctaaaccatccaatttctttgtagcaacctgataaaatcacttgttccacacttataggaaaatctaaatcaatatgtgctttttgtggaatatatgtaatatgttgcagttgttgttgtataggtttgttatataacaatttagtaccggtagcattaaattcaccaattaaagacttgataagggaagatttaccagcaccattcgggcccatgataccaattatttcgccgcgtactggtatcgataaggaaatgtttttaagtacatgcttattacctaaaaacagatttaaatcttttgtttctaacaaacgtttatacctcctaattaaaagtttaggctaacctaattaattgtataataaactgagaatatttatcatgtcaagtaaattcgtgatataatatagacaatgtatgtgaggtgaaagtatgttaactgaagaaaaagaggactatttaaaggcaatccttacgaataatggcgataaaaactttgtgacaaataaaatcttatctcaatttttaaatattaagcctccatctgtaagtgaaatggtaggacgtcttgaaaaagcaggctatgttgaaacaaaaccatacaaaggtgttagattaacagaggatggtttaacgcatacgcttgatatcattaagagacatcgactattagaattatttttaatagaaatattgaaatataattgggaagaagtacatcaagaagcagaaattttagaacatcgaatttcagatttatttgttgaaaggctggatagcctgttaaatttcccagaaacttgcccgcacggcggtgtgattcctagaaataatgaatataaagagaaatatataacaacgattttgaattatgaacctggtgatatcgttacaatcaaacgtgtgagagataagaccgatttgctaatatatttgtctagtaaagatatttctattggtaatgaagtggaaattgtatcgaaagatgaaatgaataaagtaattatcattaaacgtaatgataatgtaattattgtcagttacgaaaatgcaatgaacatgtttgctgaaaaataaaataaagaagccataaagatatccatgattgaactgataaagacatatggataattgctttaggcttcttttttattagttaatttatcaagtgagtatatttgagtaaaatattcactgcataaagattgaagataatccagattgtactataaatgaagataggtacatgactgagttctttaagtgcactaccatcccactgtggactcggacgctggaaagtcaatttagcaatcgtccaactagattgtagaacttcgcctaataatacacctaaaatatattgataactcattgtgacaagtagttgaatttctactatattttcatcttttaatataaaatacaacatgatagaaattaaagttataacaacaatgggtgagccttttctagatgttaaaattaaaaaataaataaatatcaataaataggtaaatataaagaaactaggtatctgataatggctcgacgctaaacctatcaataacataataggtggcataaaataaccaccaatcgttgtaagccattggcctgctagatgtctagattgtgtaattgcgaatccttgttgtaatgtctgttgtcgctctcgtggacttgttacaatgactaaatcttttgcacggccaccagcgagtttattaaacagtacatgaccaaattcatgtgttaaaacagggatatagtttaaaatgacatctaaatagttcaaaacaggcttatgtctatattgatgaatagcaatataacaagctgcaacaataacgataatgtatatattaagttgaattgtcgtattaaaaaagtttgataaataattcattgttaacctcatataagatattaatttaaagtttgcttatcacttattataaatgatattggcatcaatagcgttagactttagacttaccttagttaaactaattttaatttttgaaaaggtgaatatgtgttaaaataaagcaaaatcatttcgatataaataggatgaatataaatactgttaatattgattacactaacataataatgaaataagataggagattcctgttatgactgttgaagaaagatccaatacagccaaagttgacattttaggggtcgattttgataatacaacaatgttgcaaatggttgaaaatattaaaaccttttttgcaaatcaatcaacgaataatctttttatagtaacagccaaccctgaaatagtgaattacgcgacgacacatcaagcgtatttagagttaataaatcaagcgagctatattgttgctgatgggacaggagtagtcaaagcttcgcatcgtttaaagcaacctctagcgcatcgtatacctggtattgagttgatggatgaatgtttgaaaattgctcatgtaaatcatcaaaaagtatttttgctaggggcaactaatgaagttgtagaagcggcacaatatgcattgcaacaaagatatccaaacatatcgtttgcacatcatcacggttatattgatttagaagatgagacagtagtgaaacgaattaaactgtttaaacctgattacatatttgtaggtatgggattccctaaacaagaagaatggattatgacacatgaaaaccaatttgaatctacagtgatgatgggcgtaggtggttctcttgaagtatttgctggggctaaaaagagagcgccttatatctttagaaaattaaacattgaatggatatatagagcattaatagattggaaacgtattggtagattaaagagtattccaatatttatgtataaaatagccaaagcaaaaagaaaaataaaaaaggcgaaataatcatgatgacaaaaataaaaccgaggaaatccttaaatggagattctcggttttttcggtttatttaataacgaagcgggactcatcgagtttgtttctaaattctttttgttcggctttggatttctttttaaaatcgttaaggaaagcttcatatttaggtaatacatcatcaagttcaccgtaatcttttaactttccgccttcaatccaagcaatcttagtacaaaattgtctcacttgtcctaagttatgactaacgaaaaagatggttttgttttgctctttaaactcgtaaattttatctaaacatttttgtgcaaaagtttggtcacctacagataaagcttcgtcaatgactaagatatctggattaactgtgatattaattgaaaaaccaagttttgcacgcataccacttgaatactttttaactggttgataaataaactcaccaagttcactaaattcaataatcttaggtgtcatcgctttaatttcttttcgcttaaagcccatacataacattttaaattcgatattttcaatccctgtaagttgtccactcaagccagcactaattgcgataacgctgacttcaccattacgatccactttgccaacagtaggcgacaaagaaccgccaatgatattgctcaacgttgatttgccggaaccattgatgccaacaagccctatgacgtcaccttcatatgcttttaaactaatgtcatctaaagcgaaaaatgttttgtttttatgtttgggaatgagcgcatctttcatacgttctttatttgtacgataaatacgatattcttttgttacatttttaatgtttaccgaaacgttcatttgtagaccttccttattcacatttatctagattataatatactactcaacagttgttaaattttaaaacctgttgtaaagtgtatagaagattttgttattatcagagtgggtgttttgacacaaaatgttaatcatcaatgataacaatgatatttaaaaactaaacttatttcaacttacatgattgtatactataatgtatttgtaataaactaatattttaaagaactagacaataattttgatagcatccatgtatagtgatagtatttacaacaattattataatactatttagttaagtagagaaatagttaaacatttgaaagtgtggtttaatggaatgtcagcaataggaacagtttttaaagaacatgtaaagaacttttatttaattcaaagactggctcagtttcaagttaaaattatcaatcatagtaactatttaggtgtggcttgggaattaattaaccctgttatgcaaattatggtttactggatggtttttggattaggaataagaagtaatgcaccaattcatggtgtaccttttgtttattggttattggttggtatcagtatgtggttcttcatcaaccaaggtattttagaaggtactaaagcaattacacaaaagtttaatcaagtatcgaaaatgaacttcccgttatcgataataccgacatatattgtgacaagtagattttatggacatttaggcttacttttacttgtgataattgcatgtatgtttactggtatttatccatcaatacatatcattcaattattgatatatgtaccgttttgttttttcttaactgcctcggtgacgttattaacatcaacactcggtgtgttagttagagatacacaaatgttaatgcaagcaatattaagaatattattttacttttcaccaattttgtggctaccaaagaaccatggtatcagtggtttaattcatgaaatgatgaaatataatccagtttactttattgctgaatcataccgtgcagcaattttatatcacgaatggtatttcatggatcattggaaattaatgttatacaatttcggtattgttgccattttctttgcaattggtgcgtacttacacatgaaatatagagatcaatttgcagacttcttgtaatatatttatatgacgaaaccccgctaaccattaataaatggaagtggggttcatttttgtttataatttaagtaaataacatattaagttggtgtattatgaacgttttaataaagaaattttatcatttggtagttcgaatactttctaaaatgattacgcctcaagtgattgataaaccgcatatcgtatttatgatgacttttccagaagatattaagcctatcatcaaagcattaaataattcgtcgtatcagaaaactgttttaacaacaccaaaacaagcgccttatttatctgaacttagcgacgatgttgatgtgatagaaatgactaatcgaacattggtaaaacaaattaaggctttgaaaagcgcgcagatgattattatcgataattattacctattactaggtggatataataagacttctaatcaacacattgttcaaacgtggcatgcaagtggtgcattaaaaaactttggcttaacagatcatcaagtcgatgtgtctgacaaggcaatggttcagcagtaccgtaaagtttatcaagcgacggatttttacttagtgggttgtgaacaaatgtcacaatgttttaaacagtctttaggtgcaacagaagagcaaatgctgtattttgggcttccgagaattaataaatattacacagctgatagagcaacggttaaggcagagttaaaggataaatatggaattacaaataagttggtattatatgtaccaacatatagagaagataaagcagataatagggctattgataaagcttattttgaaaaatgtttaccaggatatacactgattaataaattacatccatcaattgaagattcagacattgatgacgtatcttcaatcgacacgtctacattaatgctaatgtcagatataattattagcgactatagttcgctgccaatagaagctagcttgttagatattccaactatattttatgtgtatgatgaaggaacatatgatcaggtgagaggcctgaatcaattttacaaagcaataccggatagctacaaagtgtatactgaagaagatttaataatgacgatacaagaaaaagaacatctattaagtccgttatttaaagattggcataagtataatactgataaaagtttacatcagctcacagaatatatagataagatggtgacaaaatgaggtttacgataattatacctacatgtaataatgaggcaacaattcgacaattgttaatatctattgagagtaaagaacactatagaatcctttgtattgatggtggttctactgatcaaacaattcctatgattgaacggttacaaagagaactcaagcatatttcattaatacaattacaaaatgcttcgatagctacgtgtattaataaaggtttgatggatatcaaaatgacagatccacatgatagtgacgcatttatggtcataaaaccaacatcaatcgtattgccaggtaaattagataggttaactgctgctttcaaaaataatgataatattgatatggtaatagggcagcgagcttacaattaccatggtgaatggaaattgaaaagtgctgatgagtttattaaagacaatcgaatcgttacattaacggaacaaccagatttgttatcaatgatgtcttttgacggaaagttattcagtgctaaatttgctgaattacagtgtgacgaaactttagctaacacatacaatcacgcaatacttgtcaaggcgatgcaaaaagctacggatatacatttagtttcacagatgattgtcggagataacgatatagatacacatgctacaagtaacgatgaagattttaatagatatatcacagaaattatgaaaataagacaacgagtcatggaaatgttactattacctgaacaaaggctattatatagtgatatggttgatcgtattttattcaataattcattaaaatattatatgaacgaacacccagcagtaacgcacacgacaattcaactcgtaaaagactatattatgtctatgcagcattctgattatgtatcgcaaaacatgtttgacattataaatacagttgaatttattggtgagaattgggatagagaaatatacgaattgtggcgacaaacattaattcaagtgggcattaataggccgacttataaaaaattcttgatacaacttaaagggagaaagtttgcacatcgaacaaaatcaatgttaaaacgataacgtgtacattgatgaccataaactgcaatcctatgatgtgacaatatgaggaggataacttaatgaaacgtgtaataacatatggcacatatgacttacttcactatggtcatatcgaattgcttcgtcgtgcaagagagatgggcgattatttaatagtagcattatcaacagatgaatttaatcaaattaaacataaaaaatcttattatgattatgaacaacgaaaaatgatgcttgaatcaatacgctatgtcgatttagtcattccagaaaagggctggggacaaaaagaagacgatgtcgaaaaatttgatgtagatgtttttgttatgggacatgactgggaaggtgaattcgacttcttaaaggataaatgtgaagtcatttatttaaaacgtacagaaggcatttcgacgactaaaatcaaacaagaattatatggtaaagatgctaaataaattatatagaactatcgatactaaacgataaattaacttaggttattataaaataaatataaaacggacaagtttcgcagctttataatgtgcaacttgtccgtttttagtatgttttattttctttttctaaataaacgattgattatcatatgaacaataagtgctaatccagcgacaaggcatgtaccaccaatgatagtgaataatggatgttcttcccacatacttttagcaacagtatttgccttttgaataattggctgatgaacttctacagttggaggtccataatctttattaataaattctcttggatagtccgcgtgtactttaccatcttcgactacaagtttataatcttttttactaaaatcacttggtaaaacatcgtaaagatcattttcaacataatatttcttaccatttatcctttgctcacctttagacaatatttttacatatttatactgatcaaatgagcgttccattaatgcattccccatcatattacgttgcttctcgccaccaaggtttttatagtctcctgcacccatgataacttgattaattctaaatttacctcgtttggtagtaatcgtatggttgtaatttgctgtatcacttgatccagtttttaaaccatctgtacccggcaaactcatttttgcaccttccaatgaaaagttgaatgtgtaatacgtaactgcatgcgttgttggtgctaactgctttgtaaagtctaatattttaggtgtctctttaatcacgtgtaaatctaaaatggcatagtctctagcagtcgttacagtacgttcttggtctttatactttgttggtgcaaatgtacgtaatcttgaattttcagcacccgttggattgacgaaatgtgtatttttcattccgatagctttagctttgttattcattaaatcaacgaaatcgctggtgttttttgaaaccttcttagctaaaattaatgccgcggcattactagaattagatactgtaatttgtaataggtctgcgattgtccatacttgtccaggatatagtttcgtattactcaactcaggtagtgtagacataatatattctttgttcgtcattgtgactgtgtcatcaagtgaaagctgccccttatttacagcttccaatgttaagtacattgtcattaatttagtcatagacgctggattccacttagtatcgatattgtattgatacagtaattgtccagtttgacttacattaacagcactcgtcggttcgtatgcagccgacaaacctgcataaccatattgatttgctgcttgtacaggggttacgtcactgttagtagcttgtgcatatggtgtcataatacttaatgttaaacataaaatgatgataatagatattaaatttttcataaagcgttaatcttcccttttccaattcttaaatattccctaaaagcaatggttattcctacttacggaaatcattgctaattcacttcaccttaattaaattgttgaaaataaagttttctgcagttaatttgaaaaataatgcaaatatattacgtgtgtagctaaaggtgttataatgtttgtacgaagagcaaacttactcaaaagcgattaattttcatgttttaatataaagactttgagaagttattacaaaaaatgcaatagaaatattctatcatataaatgttatgagcggtattttggggcaacactttatttgatttttaaagttttgttgggagaaagtatatgatagaaatgcatgtatctatctaaatgaattaactataaatttcaaacagaagaggtaaaactatgaaacgagaaaatccattgtttttcttatttaaaaaactatcatggccagtgggtcttatcgttgcagctatcactatttcatcactagggagcttaagtggactattagtgccactgtttactggacgaattgtagataaattttccgtgagccatatcaattggaatctaatcgcattatttggtggtatctttgtcatcaatgctttattaagcggattaggtttatatttattaagtaaaattggtgaaaagattatttatgcgatacgctcagttttatgggagcatatcatacaattaaaaatgccattctttgacaaaaatgaaagtggtcaattaatgagtcgattaactgacgatacgaaagtgataaatgaatttatttcacaaaagctacctaacttattaccatcaatcgttacattagttgggtcactaatcatgttatttattttagattggaaaatgacattattaacatttataacgataccgatattcgttttaattatgattcctctaggtcgtattatgcaaaagatatcgacaagtacacaatctgaaattgcaaacttcagtggtttgttagggcgtgtcctaactgaaatgcgtcttgttaaaatatcaaatacagagcgtcttgaattagataatgcacataaaaatttgaatgaaatatataaattaggtttaaaacaggctaaaattgcggcagttgtacaaccaatttcaggtatagttatgttgctaacaattgcaattattttaggttttggtgcattagaaattgcgactggtgcaatcactgcaggtacattaattgcaatgatattttatgttattcagttatctatgcctttaatcaatctttccacgttagttacagattataaaaaggcagtcggtgcaagtagtagaatatacgaaatcatgcaagaacctattgaaccgacagaagctcttgaagattctgaaaatgtattaattgatgacggtgtattgtcatttgaacatgtagactttaaatatgatgtgaagaaaatattagatgatgtgtcgttccaaatcccacaaggtcaagtgagtgcttttgtaggcccttctgggtctggtaaaagtacgatatttaatctgatagaacgtatgtatgaaattgagtcaggtgatattaaatatggccttgaaagtgtctatgatatcccgttatctaagtggcgacgcaaaattggatatgttatgcaatcaaattcgatgatgagtggtacaattagagacaatattttatacggaattaatcgtcatgtttcagatgaagaacttattaattatgctaaattagcgaactgtcatgattttatcatgcaatttgatgaaggatatgacacgcttgtaggtgaacgaggattgaaactgtctggcggacaacgtcaacgtattgatattgctagaagttttgttaaaaatcctgatattttgttacttgatgaagcaacagctaatctcgatagtgaaagtgaattgaaaattcaagaagctttagaaacattgatggaaggtagaacaacgattgtcattgcgcatcgtttgtctacaattaaaaaagccggtcaaattatattcttagacaaaggacaggtaacaggtaaaggtacgcattcagaactgatggcatcacatgcgaagtataaaaactttgtagtgtctcaaaaattaacagattaattttatatatataagtaagcttggagcaaatacacatataccatcgaggaaattaaagtgtggcacattgatggatatagatgttaataaattgcttcaagcttttgtctattttaaatcatttgagaagttacgacataataattcttgaattaatgaaatcgatattttaagaaaaaaatgctcatggtataatacaagttataagcaaacatacatatattaaatactgtagccacgagtcataattcttcgtattttacatagcaatttaactgattttagagtccacggtacagaagtttgatatttcaatgtttctaaatttttaaaaaattaaatcataggtgggtgccaaatgtttttattaatcaacattattggtctaattgtatttcttggtattgcggtattattttcaagagatcgcaaaaatatccaatggcaatcaattgggatcttagttgttttaaacctgtttttagcatggttctttatttattttgattggggtcaaaaagcagtaagaggagcagccaatggtatcgcttgggtagttcagtcagcgcatgctggtacaggttttgcatttgcaagtttgacaaatgttaaaatgatggatatggctgttgcagccttattcccaatattattaatagtgccattatttgatatcttaatgtactttaatattttaccgaaaattattggaggtattggttggttactagctaaagtaacaagacaacctaaattcgagtcattctttgggatagaaatgatgttcttaggaaatactgaagcattagccgtatcaagtgagcaactaaaacgtatgaatgaaatgcgtgtattaacaatcgcaatgatgtcaatgagctctgtatcgggagctattgtaggtgcgtatgtacaaatggtaccaggagaactggtactaacggcaattccactaaatatcgttaacgcgattattgtgtcatgcttgttgaatccagtaagtgttgaagagaaagaagatattatttacagtcttaaaaacaatgaagttgaacgtcaaccattcttctcattccttggagattctgtattagcagcaggtaaattagtattaatcatcatcgcatttgttattagttttgtagcgttagctgatctatttgatcgttttatcaatttgattacaggattgatagcaggatggataggcataaaaggtagtttcggtttaaaccaaattttaggtgtgtttatgtatccatttgcgctattactcggtttaccttatgatgaagcgtggttggtagcacaacaaatggctaagaaaattgttacaaatgaatttgttgttatgggtgaaatttctaaagatattgcatcttatacaccacaccatcgtgcggttattacaacattcttaatttcatttgcaaacttctcaacgattggtatgattatcggtacattgaaaggcattgttgataaaaagacatcagactttgtatctaaatatgtacctatgatgctattatcaggtatcctagtttcattattaacagcagctttcgttggtttatttgcatggtaatatgtcgaagagtgactatgataatacattttaactaataaatatgtccaggcatgtcgtctattgatataggtgagatgcttggacttttttattattgatataaaggtatttaaatatttttaaagttaccgaaattgaagcattataaaaaccaagtgcacatggtaatacacttggcttttatgggaaatgaatattattgtacatatgacagtaaggactaggtacagtcatagtacttcgagcaaaatttgttttgttattataaacaacacaaaggagataacttctctattgaagaagttaaaaacattatagcagacaatgaaatgaaagtaaattaaaaattcagaatatttttaattattatattgtgagtgatatttattagggaaagctattcttcatataaattagttaaatagtaaatctttgttagaactctttccatagagttgtgacagcatttttgttgtgctactatttttatagtctaataaatatataaaggggatggtttcgtgaataaaacggttaaagatttaatactagttgtcttaggttcatttatctttgctgcaggtgtaaatgcatttattatttctggtaacttaggtgaaggcggggttacaggtttagcaattattttatattatgcgtttcatatttcaccagccatcactaacttcttggtcaacgcagtattgattgccataggttataaatttttgagtaagagaagtatgtacttaactattcttgtaacaattcttatttcaatatttttgagtttaacagaatcatggcaagtagaaactggaaacagcattgtgaatgccatttttggtggtgtaagcgttggactaggaatcggagtaattatccttgcaggcggtacaacagcaggtacaacaattttggcgagaattgcaacgaaatacctcgatgtaagcacgccatatgctttgcttttcttcgatatgatcgttgttgcaatttcacttacagttattccacttgataaagtattagtaacagtaatatcactttatataggaacaaaagtgatggaatatgtcatagaaggtttaaacactaaaaaagctatgacgattatttcaactaatcccgacaaacttgccaaagcaatagacgagcaaattggaagaggtttaaccattttaaacggacatggctattatacgcgtgaagaaaaagatgtcttatacgttgttatttctaaaacacaagtttcaaaagcaaagcgattaattaaacaaatcgataaagatgcattcctcgtaattcatgatgtaagagatgtctatggtaatggctttcttgcagatgaataaataaatggtatgagcacacatacttaaatagaagtccacggacaagtttttgaactatgaagacttatctgtgggcgttttttattttataaaagtaatatacaagacatgacaaatcgagctatccaatttaaaaagtaatgttagtcaataagattgaaaaatgttataatgatgttcatgataatcattatcaattgggatgtctttgaaaattgataatttaaaaatagaaattattttttataaacagaaagaattttattgaaagtagggaaattatgaatcgtttgcatggacaacaagttaaaattggttacggggataacacgattataaataaattagatgttgaaataccagatggcaaagtgacgtcaatcattggtcctaacggctgcgggaaatctactttgctaaaggcattgtcacgtttattggcagttaaagaaggcgaagtatttttagatggtgaaaatattcatacacaatctacgaaagagattgcaaaaaaaatagccattttacctcaatcacctgaagtagcagatggcttaactgttggggaattagtttcatatggtcgttttccacatcaaaaaggatttggtagattaactgctgaggataagaaagaaattgattgggcaatggaagttacaggaactgatacattccgacaccgttcaatcaatgatttaagtggtggtcaaagacaacgtgtttggattgcaatggcattagcacaaagaactgatattatctttttagacgaaccaacaacatatttagatatctgtcatcaattagaaatactagaattagttcagaagctaaatcaggaacaaggttgtacaattgtcatggttcttcatgatatcaaccaagcgattcgtttctcagatcatcttattgcgatgaaagaaggggatatcatcgctacaggttcaacagaagacgtattaacacaggaaatattagaaaaagtttttaatattgatgttgttttaagtaaagatcctaaaactggaaaacctttactggtaacttatgacttatgtcgcagagcttattcttaattaagtaagttaatatgataaaaaggacaattaacatgacaaatagagagaacccaacgccattgaagtttttatcctatattataggtttaagtatgatactactaatcacactatttatttctacattaataggtgacgccaaaattcaagcctctacaattatagaggctatttttaattataatcctagcaatcaacagcaaaacatcatcaatgagattaggattcccagaaatatagcagcagtaattgtaggtatggcgcttgcagtttctggtgcgattatacaaggtgttactcgtaatggtcttgctgatccggcgctcataggtttaaattcaggtgcttcatttgctttagcattaacatatgcagttttaccaaacacttcatttttaatattgatgtttgctggatttttaggtgctattctaggaggtgctattgtattaatgataggccgatctagacgtgatggatttaatccgatgcgtattattttagcgggtgcagcagtaagtgctatgttaacagcgctaagtcaaggtattgcattagcttttagactaaatcaaacagtaacattttggactgctggaggcgtttcaggcacaacatggtcacaccttaagtgggcaattccattaattggtattgcgttattcattatattaacaattagtaaacaacttaccattttaaatcttggtgaatcattagctaaaggtttaggtcaaaatgtaacaatgatcagaggcatatgtttaattattgctatgattctagcaggtattgcagttgctatcgctggacaagttgcatttgtaggtttgatggtacctcatatagcaagatttttaattggaactgattatgctaaaattctaccattaacagccttgttaggtgggatactcgtgcttgttgccgatgtgatagcacgatatttaggagaagcgcctgttggtgcaatcatttcatttatcggtgttccttactttttatatttagttaaaaaaggaggacgctcaatatgattagttcaaataataaacgcagacaattgatagcactggctgtttttagcattctactatttctaggttgtacttggagtattacctcaggtgaatacaacatacctgttgaaagatttttcaaaactttaattggacaaggtgatgccattgatgagttaatcttattagatttcaggttacctcggatgatgattactattttggctggcgcagcgcttagtattagtggtgcaatagtgcaaagtgtcacaaaaaatccaatagctgaaccaggtatattaggtattaacgcaggtggcggatttgcaatcgcattatttattgcaattggtaaaattaatgctgacaactttgtttatgtactgccgttaataagtatactaggtggtatcaccactgcattgattatttttattttcagttttaataaaaatgaaggtgttacacctgcgagtatggtattaataggtgtaggtttacaaacagcattatatggtggctcaattacaattatgtcaaaatttgatgataagcaatctgatttcatcgctgcttggtttgcaggtaatatttggggtgacgaatggccatttgtcattgcatttttaccgtgggtgttgattattattccttacttactatttaaatcgaatacactaaatattattcatacgggtgataatattgcacgaggtctaggtgtaaggttaagcagagaacgtttaatattattctttatcgcagtgatgttatcatctgctgctgtagcagtagcaggttcaatttcgtttatcggattaatgggtccgcatattgccaaacgtatcgttggaccacgtcaccagttgtttttaccaattgccattttagtaggggcatgtttacttgttatagctgatacaattggcaaaattgtattacaaccaggtggggttccagcaggtattgtcgtagcaattattggtgcaccgtatttcttatatttaatgtacaaaacgaaaaatgtatagtgtcaatggacacaacttattgctatgaaaggcactttattataaggcttttcatagcattttttatttaatgagccactcaagactatttattttttcaataatgaaccattaagttatcaagaggatcttatcaaaaatatatttgataacggtatcaggttaattctttatgatagcgcattcatttattctgttttatactatgactgataataccaaggaggtacaacatgatgaaaaagttaatcaataaaaaagaaacatttttaactgatatgcttgaaggattgttaattgcgcacccagagttagatctgattgctaatacagttattgtaaaaaaagctaagaaagaacatggtgtagcaatagtctctggaggtggaagcggacatgaacctgcgcatgccggttttgttgcagaaggtatgctagatgcagcggtttgtggcgaagtatttacatcacctacacctgataaaatattagaagctattaaagcagtagatactggtgatggtgtattactagttgtaaaaaactatgcaggtgacgtgatgaatttcgaaatggcacaagagcttgcagaaatggaaggtataaatgttcaaactgttattgttcgtgacgacattgctgtgacaaacgaagtacaacgtcgtggtgttgcaggaacagtgtttgttcataagcttgccggttatcttgctgaaaaaggttattcattaacagagataaaatcgcgtgtagaagcgttgttacctgaaattaaaagtattggtatggcaattgagccaccgcttgttccaactactggaaaatatggctttgatattgaagacgacaaaatggaaatcggtattggtatacatggtgaaaaaggtattcatagggaagaagtaaaggatattgatcatattgttggaacattgttagacgaattgtataaagaagttactgccaatgatgtcatattaatggtaaatggtatgggtggtacgccgttatctgaattaaatatcgtaactaaatatattcaacaaaatttagctgcaagaacggttaatgttgctaaatggtttgttggtgattatatgacatctttagacatgcaaggtttttctataactatcgtgcctaataaaccagaatatttggaagcatttttagcaccaacaacaagtcaatactttaaataagaagtgaatatgaataaatatacatttatgaggtggcacaaatgaaagtgaatgatatgaaagcacgtttattaaatttagaagaaacgtttaaaaaacatgaatctgaattaactgaattagatcgagcaattggtgatggtgaccacggggttaacatggttcgtgggtttagtagtcttaaagacaaacttgatgatagctcaatgcaatcattgttcaaatcaactggtatggcattgatgtcaaatgttgggggtgcatcaggaccactgtatggctttagctttgttaaaatgtctgcagtcaccaaagatgatatggataatcaagatttcattacactaattcaggcatttgccgaagcggttgaatcacgtggtaaagttactttaaatgaaaagacaatgtatgatgtagtagcgcgagcagcagagaagcttaaaaatggtgaaactttaacattcaatgatttacagcaattagcagataatacaaaagatatggtagcaacgaaaggtagagctgcatattttggagaagaatcaaaaggttatattgatccaggtgctcaaagtatggtttatattttaaacgctttgattggagatgaagataatgcctaaaattatacttgttagccacagtaaagaaattgcaagtggtacaaaatctttgttaaagcaaatggcaggtgacgttgatattataccaatcgggggattaccagatggttcaattggaacttcatttgatatcatccaagaagttttgactaaattagaggatgatgcattgtgtttttacgatattggatcttcagaaatgaatgtagatatggcaattgaaatgtatgatggtaatcatcgtgtgttaaaagttgatgcaccaattgttgaaggcagttttatcgcagcagtaaagctatcaatcggcggttcaattgatgatgcattagcagaaatcaaacaatcattttagttaaaatttactaataatgaaaaatgtaaacctttttcaaatgaaactttataaaaaatatgatagtatatatgtaaatgtttaataaaatctggagaaataggaggacattgccatgcaacaccttataaaaaaacatgtattgaatggcgagtttgatttagtacgacaattgatgtccgaaacagattttatggaatttgaagaagcatatatttcaagtgcgcatgaagtagaaagtatgatgttttatacatgtattttagatatgattaagtacgaagaatcatctgaaatgcatgacttagcatttttattgcttgtgtatccactaagtgaatatgaaggtgctttggattctgcttattatcatgcagacgcttccataaaacttactgacggcaaagaagttaaaagtttgttacaaatgttattattgcatgcgataccaacacctgttatttcagataagaaggcttttgatatcgccaagcaaattttaaaattagatcctaataataatgttgctcgtaacgtcttaaaagacactgccaaacgtatggacaacgttgttgttgatataaatgaattacaccaacgtaatgcacgttaattacatttcaattatattagcttaataatagttttaacatttggttgggttgggcatatgttccagccttttttaatacttaaaaactaacgaagtatacttgtgtgcacaaatggtttttatacaacattttataaatttatacattttaataaagaacatacgatagatggtttaaaccttgttaactgagaaattttgatatgtattcttcgaaatttaactaaatatacgaaattcaagaagcacaataattaatcatttttcctatacaaaagttcgtatgactgcattataaaagcataaatttataatttttttaaatgtcattgaacgtgataatgtgaatggattgagcaattttgaaaaagtgaaaaataacctatgcgacttgcaattaattttcagtacgttataatgcacactgtgcaaaattaaggaggtctattattcacatgatgatgaataaagaagcaacaaaaattggatttgcctacgtcggcattgtagtgggcgcaggattttcaactggacaagaagttatgcaatttttcactaaatatggcttgtgggcttatttaggtgttattatatctggttttattttagcttttattgggcgccaagtagcaaaaattggtactgcctttgaagcgacaaatcatgaatcaacattacaatacgtattcggtgaaaagtttagtaaagtctttgattatattttaatcttcttcttatttggtatagctgtaaccatgatagctggtgcaggcgcaacatttgaagaaagttataacatacctacatggctaggtgctttaattatgacattagcgatttatattacgttgctattagactttaataaaatagtacgtgcactaggtatcgttacaccatttttaattgttttagttgtattaatcgctggcgtttatttatttaaaggtcatgtttcattagcagaagttaaccaagtagtgcctgaagcaagtatttggaagggaatctggtttggtacaatatatggtggattagctttttctgtaggttttagtaccatcgtagcaatcggtggggatactgaaaagcgtacagtgtcaggtgcaggcgcgatgtatggtggtattatctatactgtattactagcattgatcaactttgcattgcaaagtgaatatccaactattaaaaatgcctcaattcctacattgacgttagcaaataatatccatcctttaatagcaacagtgttatctgttattatgctggcggttatgtataatactattctaggactaatgtattcatttgcagcacgttttacagaaccatacagtaaaaattatcatatctttattattataatgatggtagcaggttatttattaagtttcgtaggatttgctgaattaattaataagttatatacaattatgggatatgtaggcttatttattgtagtagctgtaattattaaatatttcaaacgtaaaaatgcggataaaaaacatattgcttaatatcatatgagggatatccgaaactttacaattgaatcactttgttttaaccttaaaagcaattcgtctctactcttatcgggcgaattgctttttatatttattcagtctattaatatgagcgtctaacaaatagagaggtacgatgtaatgaataaagataataaatggacgatgataactgcgctttttataactgtaatcagtgtattgttagcatttcatctgaaacaacattatgaccaaattacaaatgagaaccatgctaataaagacaaaattaatattaaaaataaaaatgtgcgcatttatcaaaaccttacatacaatagagttttccctaacagtaaattagatattattacacctgttgatatgtcttctaatgccaaactgccagttattttttggatgcacggtggtggttatattgcgggtgataagcagtataaaaacccattattagcgaaaattgctgaacaagggtacattgttgtgaatgtaaattatgcattggcgccacaatataaatatcccacaccattaattcaaatgaatcaagcaactcaattcattaaagaaaataaaatgaatttacctattgattttaatcaagtaattattggcggtgattctgcaggtgctcaattagctagccaatttacggcaatacagacgaatgatcgcttaagagaagccatgaaatttgatcagtcattcaaaccatcgcaaattaaaggtgctatactatttggtggtttttataatatgcaaacagttagagaaactgagtttccaagaatacagttatttatgaaaagttatactggcgaagaagattgggaaaagagttttaaaaacatttcacaaatgtcgacagtaaaacaatcgacaaaaaattatccaccaacatttttatctgttggagatagcgatccattcgaaagtcaaaatatagaattcagtaagaaattacaagaattgaatgtaccagtagatactttgttttatgatggtacgcatcatttacatcatcagtatcaatttcaccttaataaacctgaatcgatagataatatcaaaaaagtgttacttttcttaagtcgtaatacatcctctagtggtattcaaactgaagagaaaccacaaatagaaaatccgagtaatgaattaccgttaaatcctttaaactaatgataaacagtagtaatttattacttaagcaacatttaagattttcaaattaaaaacgaagaatttaaaacatgtggtgctaatgtgtaagagtctgagatataataaattgttagcggttctttatcatttctatctcactctattatgatgtgacatttattttacaaactaatttgttttgaacctgaaaataactttttacaactaaattgtcgaaaaacagtgtgtacatgatataataaatttataaattgaaaagaattcaaaagaaaaattaaaatatagattgagcacgaagtgatttgaaataaggttgtgaaagggaatgacaaggtcagcattaaaaccatttaaaaataaacgcgttatggttactggacgtatacaacgtgttttgtttaaaaattatttagatagacatagcacatttaagccgaatgtaaggatattattaaaagatgtatttgtttcaggtgtatcaatagatcatttatggttatatgagacaaataaatactatgcattggcaatggaacttattcatcaacgagtaaaatttagtgcgaatgttgtaccgtattacaaaataaatagaaataataatttattcgtacaagattatggaattaagcgtaaaggtaggttaattactgaagaagcttacaatcaaaacaatcagtatcaggataagatatatgaaaaattaccggatatagattttagactcgaagatttttatagtaaggaaaactaaacaacatatataaagcaccactaatcgtagttgatagttaatcaattacacattagtggtgttttattttgaatttaaatttgataaatgaataagagtgtacgtatttatttgagattagataacattgataagtatgagtaatgtattaggtaaccattaaattcgttgttatacgattctgatacaagattatgataaaatagctttaattaagaattttagccatcatatagtcatcataatatttaccatcgataaataacttatcttttaaaacgccttcgatttgaaaatcggcacttttaaaaagctcgagggcaggttggttattgagtggtacatttgcttcaattcggtgtatttgattgtttaaacaccaagccataatggcatcaagaagtgcttggccaattccacgatgttgatataatttctttacacctaaatcaattttagcaacatgtttaatgcgttgaaatggtgtcgtattaacaaaggcaaagccaacgagttgttcatcactttcagcaacgaagatgactttatgcggagaagtgatatattcttctaattgtttactagccgatgtgacgctaggatcatattctcctggtgtgtagaacatatacggagattcgtcgtatatgttcgctaacattgaaatgaaattttctacatctttgatactaactctacgtataatatgggccataaaaagcctccagtattttgaaattttaaaacatttgctactattataatatatatgtaactaaaaggtggagtaatatgttttttggttacagtttaaaggagtattttagatgaaacctaaagttttattagcaggtggaacaggatatattggtaagtatttaagtgaagtgattgaaaatgatgctgaactttttgctatatcaaaatatccagacaataaaaaaacagatgatgttgaaatgacttggattcagtgtgatatatttcattacgaacaggttgttgcagcaatgaatcaaatagatattgctgtattctttatcgacccaacaaagaattctgccaaaataacacaatcatcagcaagagatttaacattaatcgcagcagataattttggtcgagcagcggctatcaatcaagtaaaaaaagtaatctacatacctgggagtcgttatgataatgaaacaattgaacgcctaggtgcatatggtacacctgtagaaacaacaaatttagtttttaaacgttctttagttaatgtagaattacaagtttcaaagtatgatgatgttagatcaacgatgaaggtagttttaccaaagggatggacattaaagaacgttgtaaaccattttattgcatggatgggttacactaaaggaacttttgtgaaaacagaaaaatcacatgatcaatttaagatatatattaagaataaggtgcgaccgctcgcagtatttaaaatagaagaaacagctgatggaataataactttaattttattgagtggaagtttagtgaaaaaatatacagttaatcaagggaagttagaatttagattaatcaaagagtcggcagtcgtttatatacatctatacgattatatccctcgattattttggccgatttattactttatacaagcaccaatgcaaaaaatgatgatccatggctttgaagttgactgccggattaaagattttcaaagtcgattaaaatcaggagaaaatatgaaatatactaaatgatattgggtgatatggatgcaaatactactagtagaagatgacaatactttgtttcaagaattgaaaaaagaattagaacaatgggattttaatgttgctggtattgaagatttcggcaaagtaatggatacatttgaaagttttaatcctgaaattgttatattggatgttcaattacctaaatatgatgggttttattggtgcagaaaaatgagagaagtttccaacgtaccaatattatttttatcatctcgtgataatccaatggatcaagtgatgagtatggaacttggcgcagatgattatatgcaaaaaccgttctataccaatgtattaattgctaaattacaagcgatttatcgtcgtgtctatgagtttacagctgaagaaaaacgtacattgacttggcaagatgctgtcgttgatctatcaaaagatagtatacaaaaaggtgatcagacgattttcctgtccaaaacagaaatgattatattagaaattcttattaccaaaaaaaatcaaatcgtttcgagagatacaattatcactgcattatgggatgatgaagcatttgttagtgataatacgttaacagtaaatgtgaatcgtttacgaaaaaaattatctgaaattagtatggatagtgcaatcgaaacaaaagtaggaaaaggatatatggctcatgaataatttgaaatgggtagcttattttttgaaatctcgcatgaactggatattttggatattgtttttaaacttccttatgttaggcattagtctaatcgattatgattttccaatagacagtttattttatattgtttctttgaatttaagtttaacaatgatttttcttttattgacatattttaaagaagtaaaattatataagcattttgacaaagataaagaaatagaagaaattaaacataaagatttagcggaaacgccatttcaacgtcatacagttgattatttatatcgtcaaatctcagcgcacaaagaaaaggttgttgagcaacagttgcaattgaacatgcatgaacaaaccattacagaatttgtgcacgacataaaaacacctgtgacagctatgaaattattaattgatcaagaaaaaaatcaagaaagaaaacaagcattactatatgaatggtctcgtataaactcgatgctagatacacagctgtatattactagattagaatctcaacgtaaagatatgtattttgattacgtgtcacttaaacgcatggtcattgatgaaatacaattaacaagacatattagtcaggttaaaggtattggttttgatgttgactttaaagtggatgattatgtttatacagatataaaatggtgtcgtatgattattagacaaattttgtcaaacgcattgaaatatagtgagaattttaatattgaaattgggacagaattaaatgatcaacatgtttcgttatatattaaagactatggcagaggtattagtaaaaaagatatgccgcgaatatttgaacgaggatttacgtcaacggctaacagaaatgaaacgacgtcttcaggtatgggtctatatttagtaaatagtgtaaaggatcaattaggtattcacctgcaagtcacgtcgactgttggtaaggggacaactgtcagattgattttcccattacaaaatgaaattgttgaacgcatgtcggaagtgacaaatttgtcattttaaacatgcgttttgttacttagaattgatacatcaatgcagcttcaacgttataataagatagatgttagtcatatgttaaattgaagatacaagtgccaaagcctaaaggaaatgaagttaagataaattataggagtgttaaagtggcaattttagaagtaaaacaattaacaaaaatatatggaactaaaaaaatggcacaagaagtgttgcgagatatcaatatgtctattgaagaaggcgagtttattgctattatgggtccctctggatctgggaaaacgacattattaaatgttttaagttcaattgattatatttcacaaggttctattacattaaaaggaaaaaaattagaaaagctttcaaacaaggaattatctgatatacgcaagcatgatattggttttatttttcaagagtataatttactgcatacattgactgttaaagaaaacataatgttaccactaacggtacagaagttagataaagaacatatgttaaatcgttatgaaaaagtagcagaagcattaaatatattggatattagtgataaatatccctctgaattgtctggtggacaaaggcaacgaacatcagctgccagagcatttataacattgccttctattatatttgctgacgaaccaacaggtgcactggattctaaaagtactcaagatttattaaaacgattaacaagaatgaatgaagcatttaagtctacaattattatggtaacgcatgatcctgttgcagcaagctatgcaaatcgagtagtgatgctaaaagatggtcaaattttcactgaattataccaaggggatgacgataaacatacctttttcaaagaaataatacgtgtacaaagtgttttaggtggcgttaattatgacctttaacgagataatatttaaaaatttccgtcaaaatttatcacattatgccatctatcttttttcgttaattacgagtgtagtattgtattttagctttgtagcattaaaatacgctcataaactaaacatgacagagtcatatccaattataaaggaaggctcacaagtcggaagctactttctatttttcatcataattgcatttttgttatatgccaatgtgttatttattaaacgacgaagttatgagcttgcattatatcaaacattaggtttatctaaattcaacattatttatatactaatgctcgaacaattactaatatttataattacggcaatattaggtattattattggtatttttggttcgaaactgttattaatgattgtctttacattattaggaattaaagaaaaggttccaattatttttagtttgagggcggtatttgaaacattaatgttaatcggtgtcgcttattttttaacatctgctcaaaattttatattagtgttcaaacaatctatttcacagatgtcaaagaataaccaggttaaagaaacaaatcataataaaattacatttgaagaggttgttttaggcatcttaggtatagtattgattaccacaggatactatctatctttgaacattgttcaatattatgattctatcggtacacttatgtttattttattgtcaactgtgattggggcatacttattttttaaaagctctgtttctctagtttttaaaatggtgaagaagtttagaaaaggtgttataagtgtaaatgatgtcatgttctcatcatctattatgtatcgtattaagaaaaatgctttttcacttacggtcatggcaatcatttcagcgattactgtttcagttctttgctttgctgctataagtagagcgtccttatcaagtgaaataaaatatactgcaccacacgacgttacaattaaagaccaacaaaaagctaatcaattagcaagtgaattaaacaatcaaaaaattcctcatttttataattataaagaagtaattcatacgaaattgtataaagataatttatttgatgtaaaagcgaaagaaccatacaatgtaacaattactagtgataaatacatccctaatactgatttgaaacgtgggcaagctgatttatttgtagcggaaggttctatcaaagatttagtgaaacataagaagcatggtaaggcaattataggaacgaaaaaacatcatgttaatattaagttacgtaaagatattaataaaatctattttatgacagatgttgatttaggtggaccaacgtttgtcttaaatgacaaagactatcaagaaataagaaagtatacaaaggcaaagcatatcgtctctcaatttggattcgatttgaaacataaaaaagatgctttagcattagaaaaagcgaaaaataaagttgataaatctattgaaacaagaagtgaagcgataagctcaatatcaagtttaaccggaatattattatttgtaacatcatttttaggtattacattcttgattgctgtatgttgcattatatacataaagcaaatagatgaaaccgaagatgagttagagaattatagtattttgagaaagcttggatttacacaaaaagatatggcaaggggactaaagtttaaaattatgtttaattttgggttacctttagttattgcactatcacatgcatattttacatcattagcatatatgaaattaatgggtacaacgaatcaaataccggttttcatagtaatgggattatacatttgtatgtatgctgtttttgcagtgacggcttataatcattccaagcgaacaattagacattccatataaaatatacagatggctttcagtagagtagtggattcggattcacgaactatactggaagctttttattataaatgaagagaagttatatttttagcatgtatagttgaatactgggttaaaataccatattaataatgaagtaaaggtatgagtgattatgaaagtgttttgaatgaaatatatttaattggtgatgcttttaattgaaaagattaacaggattcaactttgtaaattgtattaaatgtgagaaaataaaagtatattcattgagagatatatgagtcaatgatcgttttaaacaagataagtgtattttaatatgtaaaagttatgtaataaatattgtatcgttgcaaatttcccaactatatccatttacaatttttagagttgtatagataaaaaattgcctatacaataactttttcaaaacaaatgcctactactatttaaattttatgtaaaagttaagtttcggaattgttaaaaatttgtaaattgaattgtgggattgtaaattttgtgctattttcatataagggcaaatacagtaaattgtttactgtgaggcatttttgaaattaatatcagtacactaaaattatactgacgattgataataacaaatttgtatcattagtttgtaaattcacttgtcttaatttgaaacaaattataactgaatgtgattggtgacaatcgcttaaatggaggattttaaatgtttagtaagaaaaaagataagtttatggttcaattagaagagatggttttcaatctggatcgtgctgctattgaattcggtaaaatggatttcaatacacatttagatttaaaagcatactcagacaacattaaaacttatgagtcacatggtgacgaattagtacatcaagtaattactgatttaaatcaaacatttatcacaccaattgaacgtgaagatattttatcattatgtgatgcaattgatgatgttttagatgcaattgaagaaacggcagctatgtttgaaatgtattcaatcgaatacacagatgaatatatggctgagtttgttgataacattcaaaaagcagttgcagaaatgaaacttgctgtcggcttattagtcgataaaaaattatcacatatgcgtattcattcaattaatattaaagaatttgaaacaaactgtgatggtattttaagacagtcaattaaacatattttcaatagcgaaacagatccaatcactttaattaaaataaaagatatttatgaaagcatggaagaaatcgctgataaatgtcaaatcgtagcaaataattttgaaactattattatgaaaaatagctaaggggagtatatatttatgtcatatataatcatcgtcactatagctgtagttattttctcgctgatatttgactttatcaatggattccatgatacagccaatgcagtagctactgctgtatctactagagcgttaacgcctaaaacggcaattttaatggcagcagtgatgaactttataggtgctttaacatttacgggcgttgcaggcaccattactaaagacattgtcgatccatttaaattggaaaatggattagttgttgtgttagctgcaatacttgcggctattatttggaatttagctacttggttttacggaattccaagttcgtcttcacatgcacttataggttcaattgcgggtgcagcaatcgcatctgaaggctcatttggagtgttacattaccaaggtttcacaaaaattattattgtattaatcgtttcaccgattatcgcattttgtgttggtttcttgatgtattcaatttttaaagttatctttaaaaatgcaaatttaacaagagcgaatcgtaactttagatttttccaaattttcacagcagcgttacaatcattctctcacggtacgaatgatgcgcaaaaatcaatgggtattattacgttggcattgattgtcgctaatgtacagaatgatggcagtgttgaaccacagttatgggtaaaatttgcctgtgcgacagcaatggggcttggtactgcaattggtggctggaaaattatcaaaactgtaggtggtaatattatgaaaatacgtccagcaaatggtgctgcggccgatttatcatctgcattaacaatttttgttgcatcatcgctacatttcccattatcaacaactcacgttgtgtcatcatcaatcttaggtgttggtgcttctaaccgagctaaaggtgtaaaatggagcactgcgcaacgaatgatcattacatgggtgattacattacctatttcagcattgttagcaggtttactattctatatacttaacttatttttctaattgaaaataaaactaaactgaacttcagtatcacaaacatatggtggtattgaagttcagttttttatgtaagtagataacatattttatagaatttacgtagaatgaccaagacaaagcattttaattaggaggctatattataaatgtattccatggaacataatcagttaggtcattaaaatatatgtaagagcaaaataatgatttaatagtttatattcttcaatgaaggaataattaaatagttatcaacttgtttaattaacctaaattgtattgggctttatttaatataaatttgtatatgtagacgaaaaagcgtaaaatactggtataacaaattaaatcattatatagtcaacttagttgcattattttgatttttaatatattatgcatttaatttaatcaaataggtaggttgttaatttttacctaactaccattcatacaaaatataaatatgtatgatagggaagggtgagataattttttgtaccaaaatgaaaatttttttcaaaaataaaaaactagcaatctcacatgatgtgaattgctagtatatatcagtacaatttatttaattaatggatgaatgcatagctagaaacttctgaagctggaattgtacggtagttcatattgtatggaccatatgtgtaattcatttcagaaatcaagatactaccatcaccattgacacgttcaacataagcaacatgaccatatggaccaggtgtgctttgcataattgaaccaactgatggtgtgttgtttacttggtaaccatcattagctgcgttaccagcccaatacttagcgtctgaccaatatgtgctaattggactaccagcttgagcacgacggtcaaatacgtaccatgtacattgaccagcagtgtataaattttggtgattaaaagatgatgcattgccattgctacctgttgtagctgttggtgttgtaccacctgatccaccattaggaatttgtaatgtttggttaggcataattaaataaccacgtaagttattggctgccattaattgatcaactgaaacaccatatctgctagcaatgatatttaatgattcaccagcttgtacagtatgagatgatgctgaaccagcttgtggagaagtgtttgacgtattttgtgcatcacttccacctactgagataacttgaccagggaataccaagttgttatctaattggttattttgtttaatactctctactgaagtgttgtatttttgagcaatactccataatgattcaccagattgtactgtatgttgtgtagaagcttgtgcatcatgatgcgttaaaaatgcagctgcaccagatgttgctgttattgcaaatgctaattttttcaaagggactcctccttaaaattatgttttactacttttaaaaattattaagacaatttatatagtaaattaagttttcgttttatattacgatttccatattatcaaaaataagtagctttgtgtggtttgttattatcttgtaatattattaacattttaggatatcggttcatatttttataaatgctgatttgatagtgtataaaagcgttttagtgattttaactaattataaaaaattatattttgtaacattgtaaaatgtaaaattactatacttgttaaaggttatttcttttgatgaagcaaaatttactgtaaaatttgacgcataaaacgacggtagaaggaggaattattttgtcgcaaaatacaaatcattcatattatcatcaaaaccagcatgctcaatcaataagtaaagtgtggctttattttatgtattattggattatatttggcataggatgctatctaggtcagtttttaccattaagttggcgacaacccttgtcatttggattactgattattattttagcaacacttgtttttgaaagagcgagacggttcggtttaattatttcacatatttacgctgtagtgattggcttattgtcatacgcaacgtttaccacgtatttacaaaatttaggaccagatattttctataaaaatatcgcattagcaatttttgcatttatagcatttggtattattggttatttcttcgttggagatgcatcgagtataggcaaatatttattcgttacattaataacattaattattgcgagtctaattggtatttttcttcaaaatcctattttttacactattattaccgtcgttagtctgttgttatttctactttatactttgtatgattttaatcgtttaaaaagaggtgactattcaccaagagaaatgggatttaatctatttattaatttgttgaatattattaaggatatactttaccttgctaatatgttcagaagataaacagttaaattaataaagaaatttgtataaagttttggaataatcaataatgaatatcaaccttaaactggagcgattgtcataagttagaaacttagactgagattttactgataaagcaataaaaatatattaccttaattgtaaagatattattaatcattgaaatgattaactgctatagttctaaagtaaacaaatcttagaagataaactttaaacaggtgtacttgcctttctaattacacttttattagaaaagtaaagtatagctacgtattaattttaaaatcgaaacattaataggaagaagtatagataatataaacaatttaatgttagtttgagctcatctcaaaagtagaatgtgatttaaataagtgtttatttttaaattgaaaatgaatatataactaacaaaagataatagtaatacgttgtagatgtggtcatttaaaattattttgaaaatactaaaaagtagtgtgttttcaattggatagtttaattaaactgactacatctatttttgtaatatttaaatgattgatatataagtttaaaaattaaccattatatagttttatttatttttgatttggtattcgtattgtgttaaatttacgtttaattaaataagttaaatattatagggaatgataaaagtggtacttaaatatagaaagaggtaaagttatggcaaaatcatgcttgcatatacttactaataatgaatatgcgacaacgcgttgccaagatggcatagtcttattttggccaattgacggggaaatcgaactacaaaaatttcgtaaaagtaaaataattgaagatgatatatatattattaatcatctggatgtatttagtattaagaataataaaaaaacgatcatgttgtatttgagtagcgattggtttgcggaattaggctttactttctttaattaccactatacagcaaagttgattaaatcatcctataatttgaaatgtctactattaaaattgacatatcgataccttgataatcagcctcttaatgacgctgatattagaaaattacaggatattattaaaatcattgcaaaagaagcaagtatggataaaaagattgcacaaaatcaatatcgatatgcgtattatggtgatttgcgtgatgagctcgaatatatttatcaaaatgtaaatcaacgattgacattaaaaagtgtcgctgataaattatttgtctcaaagtcaaatttgtcatcacaattccacttacttatgggcatgggttttaaaaaatatattgatactttgaaaattggtaaatcgattgaaattctacttactactgatagtactattagcaacataagtgaacatttaggttttagtagtagctccacttactctaaaatgtttaaaagttatatggatataacaccgaatgaatatcgtaatttatcaaaatataataaatgtttaatgctaaagccagaaccactagtaggcaaaatggtgcaagaagtaaaagaaatcatattgaattatattgaacattataaaaaccacctaactgatgttatacatattgatgaagacaaatttgaaacacctaaattgtttcaaacggttattcaaataaatacttatacagaaatgaaattagttttcttagaaggaatctttaaaaccttattgaataagaacagtcaagttgtctttttcatcatgccatcgattctaaaaagtaaaaataccatgtccgaagaagaaaaattcacaatcattaaaacaataattgaaagtgatctaaagatagcatttaatataaataatattgaaacaacttattttgttgaagaagcttttatgagtgttttcagacaaatatctccaaacgaattaagtaatcataataattacgaagtgcattttgtttttgatttatcattgatggaaattagaacaatttatcgaatgatattaaaattacataacatcatgttgaatgtgaaattaggattgaacattacctgtttatttgaaaaaccttcagtttttaaatcactagtatcacaaataaagcgacttaaattcgattcgttaataatagataatgcaaatttaagtagcccttatttgatgggggaaagtgatgagttactattgaaaaatattttgcattttaaaaatttaaaacaagtaattaatgaattggatattgaacaagaaaagctgatttttctaaatgttgaaaatcataaactgcttaataataaagaacgagatctaagtaatagtgctccattaatttataagacattaagtgcgctgtatcacaactttgatggctttggattaaacatttttgacaatcatcaagcatttaatgcgatgcatctatatgacaaaaatggatttaaaacaacactaggtcttatattagaaaagtttatcgaatatgtctcgaaaccaaaatacgaaaacagttattattctatttttgatatagagaattattattgtcttgttatttatgattggcgagtgatagagagcgagacaattatgagtaattttgaggatagtcaagtttatataaattttaaaaacaatgttttaaacgataaatatctaattgtaatagaaacattggacgaaaatagtggcaacattaatcatttgatttctaaagaattaagagataaatatgaatggaaccctagtttactatctaaaattgacaactaccttaaaccagcaatagagattaaagagcataattttagtgataattccttgaatattaacgttacttttaatgcgttatacataattaaaataggaaaaaaataacaccttgatatgtattgcaaaatttaatttgcatttgttggtaattttgacaacgtattaaaaacaaatgagaaagacaatggctgaaaaatttaagataataatgacagaagcattgtctttatatatttgggggtgcaacattttgaatactgagaaattagaaacattgcttggcttctataaacaatataaagcattatctgaatatattgataaaaaatataagttgtcgctaaatgatttagcagtcttagatttaacgatgaagcattgcaaagatgaaaaagtacttatgcaatcatttttaaaaactgcaatgggtgagctagatttaagtaggacaaaattattagtttctataagaagactaattgaaaaagaaagacttagtaaagttagatcatctaaagatgagcgtaaaatttatatttatttaaataatgatgatatatctaaatttaatgctttatttgaagatgtagaacaatttttaaatatttaattgaaattgagtgtcgaaagcatagaatttgcttatcggcacatttttaatttatacatattttaaaactaagtaacagtttgaagaaatcgtagttcaataatgttaattgtgaaaatgtatataaacataaaaaaatcatgtataatatatgttgttaattaaacagttcgaaagcgagatgacattatgggacgtaaatggaataacattaaagaaaaaaaggcccaaaaagataaaaacacaagtagaatatatgcgaaatttggtaaggagatttatgttgcagcaaaatctggtgaacccaatccagaatctaaccaagctttaaggttggtgcttgaacgcgctaagacatattcagtgccgaatcatattattgaaaaagcaatagataaagctaagggtgctggagacgaaaactttgatcacctaagatatgaaggatttggcccaagcggatcaatgctaattgttgatgcgttaacaaataatgtaaatcgtactgcctctgatgtgcgagctgcttttggtaaaaacggcggtaatatgggtgtatctggatcagttgcttatatgtttgatcatgtggcaacatttggtattgaaggaaagtctgttgacgaaatacttgaaacattaatggaacaagatgtagatgtaaatgatgtgattgacgataatggattgacaatagtctatgctgaaccagatcaatttgcagtcgttcaagatgcgcttcgtgcagcaggtgttgaagaatttaaagttgctgaatttgaaatgttacctcaaacagatattgaactttctgaagcggaccaagtaacatttgaaaaattaatcgatgcattagaagatttagaagatgtacaaaacgtattccataatgtggatttgaaataatgaaatcagcagaacaatggattgatgaattgcaacttgaatcacatcctgaaggtggtttctatagagagacaattcgagaagtattgaaagatggacgcagagcgccgtttagtagtatttattttttacttacagatgacaatatttcgcattttcatcgaattgatgctgatgaagtatggtactatcatgctggcgattctctaacaattcatatgataaatccggatggggaatatacgactgcaacattgggtactgatatccaaaatggagatgtattgcaatatgtagtgcctaaaggaacaatttttgcttcttcaatcgaaatatcaaatacttttagtttagtaggttgtatgtgtcaaccggcatttgagtttaagcagtttgaattgtttaagcaatctgaattaattacgcaatatccgcatcttaaatcagtaatcgaaaaatatgctttaaaataaaagtgatcaatgaagtggtttgaaggttgttaataaacctttgagtcacttcatttttatatgtattcttgattgaatcagaatagatttgatgcttcagctgtttttaatgaaaatagcattaaatgattttgaaaacgataagagtgtgttatttatatttttgaaaaatcacttttatgaagaaatgtgtgtactatctaattaatattgtctattttaagtaaattgaagcgagttgtagtaaaataataataaatattttcatatgattaacaaaaactataaaactgtatcatgacatgacatcatttatgtagttttatataataatgacaaggagttggtgactgtgaaagtaaagtatatagataaacgtcactggcgtcgcctaattgatagggaatacacagaggtaaaagttaataataataggtttaagggtattataggcttagtcacgatgaaaaaggttcgtgatcctttagaggtgacggtagttggacaaaatatcattgtcgcagatgacaattataaatggttgcaaatactacctgaaaagaaacgttatagtataactgtaatgtttgataataaaggcaatccattagaatattattttgatataaatatcaaaaatataacgcaaaaaggtaatgcgcgtacagtagatttatgtttagatgttttagcattaccaagtggtgaatatgagttggtagatgaagatgatttaatgtttgcattagaaagtgagcaaattacaaaaaagcaatttcatgaagcatatatgattgcacatcaaattatggcagagttagaaaatgattttaaaggattccaaaagaaaatcatgtactgctttaataaaattaatgcaaaggctcaaaaaaatcatcaaaagccacaaaataaaactaatattgaaaaaagcaaacaaataaagcctaagcaatataatcaaactaaaaatcaccaacaacaaaagaaaaactaagtaattcaagctgcagccataccaataaaattggtgaaattattcgttagtaatgaactcatgaatgcttgtagccatgaaagttcaataattgaataatttatggggggaaattatgaagattgaagactatcgtttactaataacattagacgaaacgaaaacgttacgtaaagcggctgaaattttatatatatctcaacctgctgttacacaaagactaaaagctattgaaaatgcttttggagtagatatttttatcagaacaaaaaaacaattgattacaacaactgaaggaacaatgattattgagcatgctcgtgacatgttgaaaagagagcgattattttttgacaaaatgcaggcacatattggtgaagtgaatggaacaatatcaatcgggtgttcttctttgattggacaaaccttacttcctgaagttttgagcctatataatgcccaatttcctaatgttgaaatacaagtgcaagttggttcaactgaacaaattaaagcaaatcatagagattatcatgttatgataactcgtggaaataaggtaatgaatttagctaacacacatttatttaatgatgatcattattttatttttccaaaaaatagacgagatgatgttacaaagttaccatttatagagtttcaagctgatccgatttatataaatcaaataaaagaatggtataacgataatttagaacaagattaccatgcaactattacagtggatcaagtagcaacttgcaaagaaatgttgattagtggtgtaggtgttacaatcttgccagaaattatgatgaaaaatatcagcaaagaacaatttgagtttgaaaaagtagaaattgataatgaaccgctgattcgttcgacatttatgagttatgatccgagcatgttgcaattgccacaagttgattcttttgtaaatctcatggcgagctttgttgaacaaccaaaggcgtagttttagactaatttaaggtttgtatttaattttaaactattcggttaaattgaacgtagttggttgctaatgcaccaacagcaaaagagcccctaattaataaattaaaaggggacaaaggaatacagttggttgctaatgcaccaactgcataagagcccctaattaataaattaaaaggggacaaaggaatacagttggatgctaacgcaccaactgcataagagcccctaattaataaattaaaaggggctctaagaagcggggttatggatatgtttgcagcgttattacaaataaagaattataaactctttgttgctaatatgtttctactaggtatgggtattgcggttacggtcccatatcttgttctttttgcaactaaagatttaggtatgacaacaaatcagtatggattacttctagcatctgcagcgattagccagtttacagtaaattcaattattgctagattttcggatacgcatcactttaatagaaaaattattattattctcgcattattaatgggtgcgcttggtttttcaatatacttttttgtagatacaatctggttattcatattactatatgcgattttccaaggattatttgcaccagcaatgccccaactttacgcatctgctagagaatctatcaatgtttcaagctctaaagatagagctcaatttgccaacacagtattacgttcaatgttctcattgggctttttatttggtccatttattggtgcccaattaatcggattaaaaggctatgctggattgtttggtggaacaataagtatcattttatttactttagtacttcaagtgtttttctataaggatttaaacattaaacaccctattagtacgcaacaacatgttgaaaaaattgctcctaatatatttaaagacaaaacgcttttattaccatttattgcatttattttattacacattggacaatggatgtatacgatgaatatgcctttatttgttactgattatttaaaagaaaatgaacaacatgtcggttatttagctagtttatgtgctggtttagaagtgccatttatgatcattcttggcgttttatcatctagattacagactcgaacattgttgatttatggagcgatttttggtggtttattctacttcagcattggggtatttaaaaacttctatatgatgttagcaggacaggtgtttttagctattttcttagcggttcttttaggaattggtattagttatttccaagatatcttaccagattttccaggatacgcttcaacactattttctaatgcaatggttattggacagttaggcggtaacctattaggtggtgctatgagtcactgggtaggtttggaaaatgtattttttgtatcagcagcatcaatcatgttaggtatgatacttatattctttactaaaaatcaaaaaattacaaaagaggatgtgatatcaacatgacaattattttatggctacttatcatcgctgccttcatgttagcatttgttgggttgattaagccgattattccttctgttttagtattatgggttggctttttaatctaccaatttggctttcataatcagcatttatcatgggtgttttatgtatctatggcattgctaacaatattaattttatgtgccgactttttagctaataaatattttgtgaatcgcttcggtggttctaagtttggagagtatgcagctttaattggtgtggttattggatgttttgttttaccgccatttggaattattattataccttttattttggtattcatagttgaattaatacaaggctattcatttgaaagagcagttaaagtaagtataggttcaatcgtagcatttttaacaagtagtatagctcaagcaatcattatgtttataatgattgtatggttctttatagatgctttattgattaattaataaaaagcttattgcaaaatatgtttttcggtaactgtaatttagtgattttatcattaacagtaccaaattcgcatatgatgtaataagctttttgtttataaaaatgtatgagaatgttttttcgaaatatttctttcaatgcgtaatccaataggcataactataaatgaaaatataataaatacccaattgcttacctgaatatatggtccaaaggcaagtaatgattgtggaataaagaatacatagaaaaatcctacaattagtagaatgattgctaaataggtgaatatccatatccaatttgaattgttaaaacactgcagttgtattgttttaaaactaaaccatataaataaaaagacaataaagaatccaacgactactgaaaacgggaatgaaacaaaatataaattacttccatttttttccatgaaaaatcctaaaaatcctttgagaaaactaacaatcccaattaatagaacgatgtgttgatagatatatttaaaaatatttttaaatgtttcattaggcatcgcttttagttcttttattgcatgtgcttttgggtcgtgattgaaaaaatctaaggctaataaaccatgttgttctgcgcttaataattgtttgagtatacggttaataattaactctgtatcatgagggttgacgcgaaagtcagagcgcatataagtcatataattctcgaagatttctctatcagtattgcttaatcttaatgatttaacattattttcttttgttaattgcgcagtacttttcattgttacttaagcgctcctttaaaaatgtttaattccaaattaaaatggaaatgattttatagtattaataaggtcaatcatatcatattaaacgcataaatataacgattaatattggagaggaaaatgaggacacttaataaagatgaacataattatatcaagcaaatagctaatatacatgagacattattgtcgcaagtagaatccaactataaatgtactaaactgagtattgctcttaggtacgagatgatatgttcaagattagaacatacaaatgataaaatttatatatatgaaaatgaaggtcaattaatagcgtttatttggggacattttagtaatgaaaaaagtatggttaacattgaactgctatatgttgaaccacaatttcgcaaactgggaatagctacgcaactgaagattgcgcttgaaaaatgggcaaaaactatgaatgcaaagcgaataagcaatacaattcataaaaataatttgccaatgatatctttgaataaagatttaggttatcaagtgagtcatgtgaaaatgtataaagatattgattagaattaggattatgttgctaattcatgttaaaattaaaaaagatttaatgacgttaaggagttttatatgaagaaattaatcatcagtattatggcggtcatgctatttttaacaggttgtggtaaaagtcaagagaaagccactctggaaaaggatatcgataatttacaaaaagaaaataaagaattaaaagacaaaaaagaaaagcttcaacaagaaaaagaaaaattagcagataagcaaaaagaccttgaaaaagaagtgaaagatttaaaaccttcaaaagaagataacaaggatgataaaaaagacgaagacaaaaataaagacaaagataaagataaagaggcatcacaagataagcaatcaaaagatcaaactaagtcatcggataaagataatcacaaaaagcctacatcagcagataaagatcaaaaagctaatgacaaacaccaatcataatcgaattgcttacttgttatagatgaaaggtacagcgttttaaaccttattttaagggtatgtattaattaaaatgtggtcatgattgaaacagaacgtaaaaatagacaacgtaattaataaaggagagaaacggcatgcatgaacaagattttagaattttagagggtcaagatattactttgccagaattaggtagagaattagaaaatattacaggacatacgattgctgattctactggcgaaattaagcgtgtaattgcacatttaccaaactttgagtccgatacagatacttttgttgctacatatcgtttaaaccatcaacaagattttatagatgcaacttttactgcgctgaaatcagatagagcacgtttaaaagaagtgccagttcatgttgaacttataagttatatttctaaatcaaaataaactgctatctaaaacgcaaagttgatcaaaatatcgattttgtgttttttattgagaaattatataggagtgtcaatcgatgatttattgtgaaacagagcgtttaatattaagagactggcatgaagatgatctgttaccttttcaaaaaatgaatgcgaattatgacgtacgtaaatattttccaagtttattgagttatcgtcgttcagaattagatatgagaactatggatgcggttattaaagattatggcattggattatttgctgtagaagataaagagtcccatcaatggataggctttataggtttgaattatattccagaaacaagcgattatccatttaaagaattaccgctttatgaaataggttggcgcttgttgccagaattttggggaaaaggattagcaactgaaggcgcaaaggcaacattgaagttagcagaagaacatcaaatatacgatgtctatagttttacagcagaagcaaataaagcttcacaacgtgtaatggaaaaaattggcatgacagtgtatgatcatttcgaattacccaatctaagtaagtatcatttattaaaaaggcaagtgcgctattacattaatcttcgaaagtgaaaaatttatacataagcgtaacaaacacccctaacattgtttagctgatgataacaatattaggggtgtttgtttattttttaaccttagaatgattaatcgtatgaacgagtacccagaggtttgaaatttaatattgattcaattaatgattccttagtgtcgcataacggtgcaagagcacgatgcttaggatcaataaaaccttcctcaatcatatggtcaatcattgtttgtagtggattgaaaaagccattaatattataaatggcaataggcttttcatggatacctatttgagcccaactatacatttcgaaaaattcttctagtgaacctgcgccaccaggagccatgacaaatgcatctgcaagttctgccattttatttttacgttcatgcatagaatcaactaaaattaattcagttaaacgttggcttgtgatttcatgttcatctaacattttaggcatgacgccaatagctttgccgccatgatctaatacaccatcttgaatggcacccataatgccaattgaccctgcaccaaatactaattcataaccttgttcagcaaaatatttacctaaatcgtatgctttttgtacatatgaagggtcatgacctttgcttgcaccacaataaactgcgattcgtttcatgttaatccagctccttaattcgatgaatgacttttaatagtgattgttcaaacactttttgatcttgctttgtaaaaggtgggggacctttgtggcgaccaccttgttttctaatttgtgcattcatatatcgtttatctaatagttgttgaatatttttggaattgtatatcttcccattatgatgcatgacaattaagactttgtcgactaataaacttgcgagtccataatcttgagtgactacgatatcatccttcgttgataattgaacaattttgtaatcaactgcatctggtccatcatcaacatataatgttgatacatgtggaggatataattggttcgaaaaatggctgaagctccgaataattgtcacaaaaatgcctgtctcagttgttaaatctataatagaatcaacaacaggacaagcatctccatcaataataatatgtgtcacaattatgcctctgtattgttttctttattttgttgagaggcgcttttggcaacataatctttatattttttaaatgacttgatgcgtgctttatcagcttcttgttggcgtttttgttcttctttgtgtcgtttttcaatatttttttgtaactttttattcattttagcgatttctttgcgatttttttcagctagtttatcgccttttttctcagttttctcatctaatttattaggtgttaagcctgctttttcttcgtatttttgtgattttttcatatctttaatacgttgtatttcattcttttcgcgggctttttgctcttctttatgacgcttttcgatatttttttgaagtattttattcattttatcagcgtctttacgattttgtttagctaatttttcgccttttttctcaatataggcaggatcatgttctctagcaaactttttaagttcacgtttattttcaaaatcttgttttttatcgccgacatattctttaacatcactcgctgtgttactgattgctgcagatgtttttgaagcaactttacttgtagcatctgtaactttttgtacgtccggatgttgtttgatacgtttacgttcaacaattaacggtaccaatacaattggtaatacattaatcataaatttgatgacttttttcttatccatagatcttgcctccataattactttattaattttacataccctatgatacatcaatataaacgatgatagtagtgaatcactattaagtatttcagatgttttttaaaagaagacaataaaaactgccaatcaagtgattccttaattgacagtctatattttaaaaggaaattaaatacctttaccaatgccaaatccgaagtaaagtatagcaataaagattactaatacaattctgtaaatggcaaatggaattagtttgattttgttaattagatgcaagaatgttttgattgcaattagtccaacagtaaatgcagctaaaaagcctaaaatataaaaaggtatatcagcaatctgaatatcttgataatgttttaataaagataaaccactagctgctaacataattggaacagccataataaatgtaaagtccgatgctgctttatgatttaatttcattaataccccagttgaaattgttgagcctgaacggctgaaaccaggccacatagctactgcttgagaaataccaattacaaatgcttggaaataactgatttgatctactgtttgtgggtttttaactttagctgagtatttatcagcaataatcatatagatagcacctacgaataagccaatcataacagttggcacactaaataaatgttcttcgatgaaatcatcaaatagtaagcctaaaatacctgctggcaccatacccactaatacatgtaataaatttaaacgtcttggctttgaacgtctttgttgatcgttatctccttcaacatgtttgtgtttaccaatatgtaaaatctctaagaagcgttcgcggaacacccatgctgctgcaaagacggatcctaattggatgacgattttaaatgtaaatgctgactgagaacctaaaaattcagatgattttaaccacatatcatcaactaggatcatatgtccagtagaggaaacaggtgcaaattctgttaatccttcgacgacccctaagataataccttttattaattcaatgataaacataatgtacccactttcattactcaatttaatttatttaaatatcaaaattaccatatcatgatagcatattcatttaaagacatgctagttatagttataatactagactaaagatgtatatattcattttcttttacatgtaaaactacaatattttattgagctatttaatttgattttaaggaaaaccttttataataggtttaggtgatataattgtgaaaaaattaacaacaatactgtttcaatataaaatttttccggtactcatgttcttggtcagtactggtctcggcataatcgttataacgcaaaatattttaatagcagattttttagctaaaattataagacatcaatttcaaggtttatggattgtattatttattttattaggtgttttacttttaagagcaactgtgcaatttctaaatcaatggttaggtgatacattagcatttaaagttaagcatatgcttagacagcgggttatttataaaaataatggtcatccaatcggtgaacaaatgactatactcacagaaaacattgatggtctagcacctttttataagagttatttgcctcaagtgttcaaatcaatgatggttccgctcatcataatcattgcaatgtttttcatccatttcaataccgcattaattatgttaataactgcaccatttattcctttgttttatattattttcggtttgaaaacgcgagatgagtcaaaagatcaaatgacttatttgaatcaatttagtcaacggtttttaaatattgctaaaggtttagtgacgttaaagctatttaatcgtacagagcaaacagagaagcatatttacgacgatagtactcagtttagaactttaacaatgcgcattttacgcagtgcttttttatcgggattaatgctcgaatttataagtatgttaggtattggattggttgcattggaagcaacgctaagcttagtagtatttcataatattgattttaaaactgcggcaattgcgattattttagcgcctgaattttataatgcaattaaggacttagggcaagcgttccatactggaaaacaaagtgaaggtgccagtgacgttgtgtttgagtttttagaacaaccgaactataataatgaatttctattaaagtatgaggaaaaccaaaagccatttattcagttaacagacatatcatttcgatatgatgattctgatagattggtattaaatgatttaaatttggaaatatttaaaggtgatcaaattgcacttgtaggtccaagcggggcaggtaaatccactttgacacatcttattgcaggtgtttatcagccaacaataggtactataagtacaaaccagcgtgatttaaatataggaatacttagtcaacagccatatattttcagtgcttctataaaagagaatattacgatgtttaaagatatagaaaataatactattgaagaagtgctagacgaagtaggtttattagacaaagtgcaatctttcacaaaaggcattaacacaataataggtgaaggaggcgaaatgttatctggtggacagatgagacgcatagaactttgccgtcttttagttatgaagccagatctcgttatatttgatgagcctgcaactggtttagatattcaaacagaacacatgattcagaacgttctgtttcaacattttaaagatacaacgatgattgtcattgcacatagagataatacaattcgccatttacaacgacgcttgtatatagaaaatggaagactgattgctgatgatcgcaatatttcagtaaatataacagaaaatggtgatgacttatgaaaacacgactaaaatttcaagtagataaggatttattgttagctatagttgttggtgtttgtggaagtttagttgcgctcgccatgtttttcttaagtggttatatggtgacacaaagtgcacttggtgcgccactatacgctctgatgattttagtcgttacagtaaaattgtttgggtttttaagagctattactcgatacgtagagcgccttatttctcataaagctacatttacaatgctacgtgatattcgggtacagtttttcggtaaattagtaaatgtcattcctaatgtttaccgtaaactgagttctagtgatttaatttcacgtatgattagtcgtgttgaggcattacaaaatatatatttacgtgtttattatccaccagtcgtcatcggtttgacagcgctagttacagtcatagttttggcgttcatttcaatcggccatgcgctattgattatggttagcatgttgttcactttactcattgttccttggttaagctcaaaaaaagcacgtactttaaagaaacatgcagctaatgaacaggcccgatttttaaatcatttttatgattataaagctggtatggatgaactacgtcgatttaatcaaattaatcattatcgagataatttgatggctaaattaaatcattttgataaattacaacttaaagagcaacgctttttaacgatttatgattttatattaaatattattgctatgctttcgatttttggtagtttagttctaggattaattcaaattaatgcaggccaactaaatattatttatatgacgagtatagttttaatggtcttaactttatttgaacaagctgtaccaatgacaaatgtcgcgtattataaagcggatactgaccaagcattgcacgatattaatgaagtgatatctgtaccttctactaatggaaaaaaacgtcttaatgataagtatgatgcaacgaacatttatgaagttaaggatgctagttttaagtattggaatcagcaaacgtatgtgttgtcggatattaattttaatgttaatagaggcgaaaagattgcgattgtgggtccttctggttcaggaaaaagtacattactacaaattatggcagggttatatcaattagatagtggctctgttcgtttcgaaaatatggatatgtttgaaatagatgacaaagataagtttgaatcgttaaatgtcttgctacaatctcaacaattatttgatggtacaatacgtcaaaatttatttaccgatgaaaaagatgaagcggtgcaagcaatatttaagcaattagatttagaacatttggcactagaacgtcaaattgacttagatggtcatacattatctggcggagaaattcagcgtttagcgattacgaggatgttattaaaagatactgcatcaacatggattttagatgaaccaacaactgcattagataaacaaaatagtttaaaagttatggatttaattgaagcacatgcagaaacattaattgttgctacacacgatttaactttattgtcacgttttgagaccatcattgtgatgataaatggtaaaatagttgaaaagggaaactatcaacaattactagctaatcaaggtgctttatggaatatgattcaatataatgcataaaaaaactgcttgataggctaagaaacctttcaagcagttttttaactaacaagcttacgcgtgctaattgtttttctattcttaataaattctaaacattactttaattgtcatgacaaaagttaattatttttcctttgtttcatcaaatgcatgaatgactttacctaataagcgattaagttctttaacttcatcttgcgataaagaagaagctgaagcgactttgtcagatgcattacttaattctggtctaatagtttcacttttgtcagtcaagtgaataaatacttcacgttgatcgacttcggaacgttcacgcttaattaagtctacttgttccattcgttttaataatggtgatactgtaccagtatcgagtgctaattcagttacgactttcttgacgtttacaggagattcatcccataaaattgttaagacaagaaattgtgggtatgttagattgtacttcttaaaaactttgttagagtagtagcgattaacttgtctttgagcattgtacaaactaaagcatagctgttcttttaaattatgttgatcagacattaaagttctcctccagacatactatccgtttttttctcttttcggattggtaatcattaaaaagttgattgtttattaattcacaactttctttgattcaatgccatgctaaaattaaagtatgtttaaagtttagaagatatttttgattaaatcaagcaaaaagataatttaatatatatgttatcatttttaaaaataactgtaatagaaaagagaatataaaatgaaaaataataaagatgaaaaaataagaatatccataattaacggatttttgggtagtggtaaaaccacgttactgacacattatattagtgaattattaaaaaatgatgagaaaattaaaatcatcatgaatgaattcggtacttttgatattgatagcaatagtatttcaaatgaaattgaagtccattcattgattaatggttgtgtttgttgcgatcttaaacaagaacttgtctatgaactaaaagccattgctttaaaaggggacgttaatcatgtcatcatagaagcgacaggcattgcgcatcctttggaattactagttgcatgtcaagatccgcaaatcgttaatttctttgaaaagccgattatttatggtgtattagatgcgactcgatttttagaacgtcatcaatataccgaaaatacagtttcgctgatggaagatcagttgaaactaagtgacatgattattattaataaaattgatcttataactgatgacagtcttgagaaaattgataagcaattaggtatgatttgtgcaagtattccaacttataaaacaacctatggaaaagtttcgttggaagaattggacttaactgttaaagacagagagatatcgtctcatcatcaccatcatcatgggattaaaagtatgacttacacgtttacaggtccgattgatcgtcatttgttttatcaatttataatgaaattaccggaatctgttctacgtttgaaaggttatgtgtcatttagagatcaaccaaatgcaatttatgaatttcaatatgcatatggtttaccagactatggaataattggcatgcaattaccattaacgattgttattattggtgaaactttagatacaaatcacatacgtaatcaattggatatgctacaatttacgtaaatcagaaaatgtgttgtttcaatttaacggaaatagcacattaatttcttaatacttttattgtgaatattttgtgacattgagggatggagtggatgagatatggaacaaataatgattaatcactatgttcatttttctaggcttgtacaaggtttttggcgtgcaaatgaatggaagatgactgcgaaagagttaaattattttataaatgaattagttgaacgtggaattacaacgatggatcatgctgatatttatggagattatcaatgtgaatcactgtttggtaatgctttggatttatcacccgaattaagaaataaaattcaaattgttacgaaatgtggtatcattttgccttctaagcaatttgattttacaaatggacatcgttatgatttgagtagtaagcacatcgtgaaatctgttgaacagtcattaatcaatttgaatgtagattatttagatagtctactcattcatcgtccttcaccattgatggatccagaacaagttgctgatgcattaactaaacttgttaaacaaggtaagttgaagtcattcggggtgtcgaattttaatcattcacaataccaattgttaaatcaatatattatgaaagaaagactacatattagcatcaatcaattagaattatcgccatatcacgttgatagtttacaagatggaacaatggattcaatgtatcaaaaccatgttcaaatcatggcttggagtccttttgcaggcggtaaaattttcgacaaggaagatattaaagcgcaacgtattatgaaagttgttcaatcaatagctgacaaatatggtgtgagtgacacagctgtgatgatagcgtggttagtaaaaataccgcatcgtatcatgccgatacttggaacaagtcagttaaagcgtattgatcaagcaatcgaagggctacaacttaatttagatgatcagtcgtggtttgacatttacaccgctattatcggacaagatattccgtaaacttatttacttttaaatcataaaggagcatatcatgacaaacgaagataaacgtttcgaacaattaagatttgaacgcaaatttatagttattccgtatttaatttatgcagtcattgtattactattaaatattttctattctgatttgaaaataacaatgacattattcggacttttctttgcgtataatgtagtcattttgttcatagcatttgttaaacattataaacgcacattgttactaagtcttatattaacagtgcttagtggcgcggcattctttggaattatttatgtttatggcattaatcatttttaaacattaaaaagagactatctacaataatctcatttgcattttatctaactaagtttaacttttgcttagaaaaatgatgctatgaggatattcagtagatagtttttttatgatctaatatttaaacttaggtatcgttttgtaattaaccgagataactcatcacctagcaatattatttacaaaatatttcgataaaattgtgtattttgcataaattaaaaatgtatgttttaaaaaattgttataattaaattaagattaaacaaaggggtgactgttatgtcagaagaaaaacatgtagttgaacatgaacaacaaaagaaagaaaagacaaaaaagcaatacaagccattttggattgtcatgagttttataatacttatagttgtactattactcccggcaccttcaagtctgccgataatggctaaggcagtactagctattttagcttttgcagttattatgtgggtaacggaagctgtatcatatccggtgtcagcaactttaattattggcttaatgatattacttttaggatttagccctgttcaaaatttaggggagaagctaggtaatccgaaaagtggcagtgctattttagctggaagtgaccttctaggaactaatcatgcattatcattagcgtttagtggatttgcaacttcagctgtagctctcgttgcagctgcattatttttggctgctgctatgcaagaaacgaatttgcataaaagactagctcttttagtgttatcaattgttggtaataaaactagaaatatagttattggagcaattatcgtttcaattgtacttgcatttttcgttccttctgcaacagctagagcaggggcagttgtaccaatcttgctgggtatgattgcggcatttaaagtttccaaagatagcaagttagcgtctttattaataattacttcagtacaagctgtgtcaatttggaatattggtatcaaaacggcggcagcacaaaatatcgtagcgattaattttataaaccatcaattaggatttgatgtttcatggggcgagtggttcttatatgcagcgccttggtccatagttatgtccgtagctttatatttcatcatgattaaagtgatgcctccagaaattaatacaatagaaggtggtaaagatttaataaaagaagaattgcataaacttggccccgttagcccacgtgaatggcgtttaattgttatatcgatgttattattactgttttggtcaactgaaaaagtattacatccgattgactctgcatccattactattattgctttaggtgttatgttaatgccgaaaattggtgtcatgacatggaaacatgttgaaaataaaataccatggggaacaattatcgtgtttggtgtaggtatttcactaggtaacgttcttttgaaaacaggtgcagctcaatggttaagtgatcaaacttttggtgttttaggtttaaaacatttacctattatcgcgacaattgcgcttatcacgctttttaatatattgattcatttgggctttgcgagtgcaacaagtttatcatcagcgttaatacctgtttttatttcgctaacctctacgttacacttaggagaccagtctataggatttgttttaattcaacaatttgttattagttttggtttcttattacctgttagtgcacctcaaaatatgttggcttatggcactggtacttttacggttaaagatttcttgaaggcaggtataccattgacaattgtagggtatattctagtgatagtttttagcatgacttattggaaatggttaggtttgctttaattaaaaatataaataagaatctaggttattttaaagtgacaaaaagcttaataaaataaaaagataattgaagggtgttttgtttatggcaattgctgtgttattaaatcgaatgtttcgaatggaacacaatccattatttgaatatatttatcaacaaaaagaagacattgatgcatgttattttatcattccggaagaggacatgtcttcagcttctgatttgaaagcacagttttatcgcggtactttgcagcgcttttaccaatcgttgcacgcagaaaagcttacaccttatgttatgtcttatgacgatatcatttcattttgtaaagaaaacaatatctctgaagtagtgactgcgggtgatattatgagttatcatcttgaagaatatgatattttacatcaacgttctttattcaatgaagcacgcattgccgttactttgatacgtgggaatcattactttaaagcgagtaaaacaatgaatcaacaaggggagccatacaatgtttttactagtttctataaaaaatggcgaccttacttgaggcatagagacgtatatcactatgatttaaaatcattcgaagactttgtcattgcatcacctgatgatttagtgtttgatgacatagcatttggatcctcacaaataattgaacagaataaatggcaacattttttagatcaagatatacagaattacgaaagcggaagagactatttacctgaagtattaacaagtcagctaagtgttgctttagcatatggattattagatattattgaaatttttaatgatttattggcgcgttatgatgaagatgaggcaaactatgaagcatttatacgtgaactcatttttagagaattttattatgtgttaatgacacagtatcctgaaacctcataccaagctttcaaacctaaatatcgacagataaaatggtcgcaaaatgaagcggattttaatgcatggtgcgaagggcaaacaggatttccaatcattgatgcagcaataatggaattgacacaaactggttttatgcataatcgaatgagaatggttgtgtcgcaatttttaaccaaagatttatttatagattggacatggggagaaaaattctttagaaagcaccttattgactatgatgcagcatcaaatattcatggatggcaatggtctgcttctacaggtacggatgcagtgccgtattttagaatgtttaatccaataagacagagtgaacgctttgatgctaaagctttgtatatcaaaacatatcttccgatttttaatcaaattgatgcaaaatatttgcatgatacacaacgcaatgagtccaacctttttgaacaggggattgaattaggtagtcattatccaagacaaatggtagatcatcaagaaaaacgtacacaagttttagctacatttaaagcgctagactaattcggctcaattgatagatctggcatgagtaaaatctggagcagaatataaagttcttaagcaatataaataagccaatttctattattgatgtgatagaaattggctttcctcaaatatataagttgtatttagttttcttattaatttgatgttatcttagtatgtccgtaaataaagtgaggtatagtacgacatactctaaaaacgtagcgagataaatatatttcaatctaacttttatgttttgaggcacttgccatttaggatattgtcgttcgtaatacgacacttgttgtataaatacacctagtccaaatggcagcatcatgagtaagatacttcttaaataacttaaaccaatatcatgccatatgtgtccaataatcaattgaaagacaatgatagatactattaaaacgattatatttattgtcacttgttcaaacgcactccttttccaaataatagaattgctgcttgcatgacaaccataaaacatacaaacatagcagttttaagcgttagactttctagaatgtgatttagaacatgtaagggctcattaaagaaataaacggaatgtaagcgtaagaaacgaccaatataaattccgaatccatttaaaaacattagcacgacaacaattaatctattaagccaacggtgagaagtcaatgttagtatttcaaaatagattaaaatcatcacataaaccgctaagaagacaccaagcagtaaataggtaaagtatttccactcacttaaatttagtcctgcgtaaaagttgaattgaaattggttcaaatggattaaatcagttaccatataaaatgtatttggtaaaagtaacacaaatataaaactatatatgataaagagtggccattcatactttttattcggtttgaataatcgtaataatagactaagctcaaaaggtatatatgctaaaaacaaatttaaagtcataaattgaaaaattttagtctcaaaaagggagacgataaataaaattaaaaagtaaattctagcgatgtatcgagattgcatcaataataaacactactttctaatgaaaaagttattcattcaaatgtgatagttataaacgcattcaattcctaattaaaaatttaatttaactcgttgaagtatattaataaacgagaatgcatttatgattaagcacttatgataacttgtaataaaatttgattcaactaaaaagtaaagtgctattgaggatcaagtaaatttaaaccgactgcatctttgaatgaacgttgaatgtccaaatcagttacagtaagaatgatttcagcagttgcagaaacaattgctttagcgagatgtccgctaaaagtttcatatgattgagtaccgaaagtagcatgcaaatgtgcaaaatgaccattgtctagacgagaaatattacctaataagctcgtcaattccagtggctcagtaatatgtttttcttcgtattgtttcgttgttaaattgaaaaattttaatacaacgtcatcacatgcaccaatgccgctgacagatgtaaatgttaagtcttggtcatctgcaaaggttgttatacattcaacgatatcttctcctttttccaacactagtagtatagtatgattacttttttgcaatttcatatgatcaatcccctttattttaatatgtcattaattatacaattaaatggaaaatagtgataattacaaagaaaaaatattgtcaaatgtagcaatgttgtaatacaatatagaaactttttacgaatatttagcatgaattgcaatctgtcgtggaaaagaagaataacagctttaagcatgacatggagaaaaaagaggtgagcatatgaataaacagatttttgtcttatattttaatattttcttgatttttttaggtatcggtttagtaataccagtcttgcctgtttatttaaaagatttgggattaactggtagtgatttaggattactagttgctgcttttgcgttatctcaaatgattatatcgccgtttggtggtacgctagctgacaaattagggaagaaattaattatatgtataggattaattttgttttcagtgtcagaatttatgtttgcagttggccacaatttttcggtattgatgttatcgagagtgattggtggtatgagtgctggtatggtaatgcctggtgtgacaggtttaatagctgacatttcaccaagccatcaaaaagcaaaaaactttggctacatgtcagcgattatcaattctggattcattttaggaccagggattggtggatttatggcagaagtttcacatcgtatgccattttactttgcaggagcattaggtattctagcatttataatgtcaattgtattgattcacgatccgaaaaagtctacgacaagtggtttccaaaagttagagccacaattgctaacgaaaattaactggaaagtgtttattacaccagttattttaacacttgtattatcgtttggtttatctgcatttgaaacattgtattcactatacacagctgacaaggtaaattattcacctaaagatatttcgattgctattacgggtggcggtatatttggggcacttttccaaatctatttcttcgataaatttatgaagtatttctcagagttaacatttatagcttggtcattattatattcagttgttgtcttaatattattagtttttgctaatgactattggtcaataatgttaatcagttttgttgtcttcataggttttgatatgatacgaccagccattacaaattatttttctaatattgctggagaaaggcaaggctttgcaggcggattgaactcgacattcactagtatgggtaatttcataggtcctttaatcgcaggtgcgttatttgatgtacacattgaagcaccaatttatatggctataggtgtttcattagcaggtgttgttattgttttaattgaaaagcaacatagagcaaaattgaaagaacaaaatatgtagcataagtattttggtgtatattgatataaagtaaagcgtaatattatgaatgattagcatcgtttttcttatgaattttattaagaaaattcgatgctttacatttaaaaagattcgattgactaaatgttttactctttatatttaaatgttatatgtaacaaaaaatgattttgagtaataaacatgttacaaatattacattctttttaaattgcaatccacatacctaattcattaacgttaatgtgttaagatgataaaaaatgagtaaggaaatgtgggtaaggggatgacagtaaaaaatttatttttaggctttgttgctgtaatattaaccgtttgtttaattggtttattaatattagcaacaaatgaagatgcgcttgctaaggtacataaaacaattaatacgcttaacgcgataaatgtatcaactgaagatacttataaaaagaaaatggatattctcaatattcatactgctaaagcatctgaagtgaatgaaaatgtgaaaaagcaaaatcattttaaacatcgtgtgaatgcaaataaatcaaattcttttaacgaacaagagtgccaagttattgctgatcgttatgcagataagcatatcaatgataattatggtttagaaagaatttctaagacaaatcatggatataattatgtgtattccaatgataattcaactagtaagcaacatgtaagtatttcaaatcaaggcataataacgaaataatagatggaacagtgtattctaattggatatactgtttttattttgcaataatttaatttaaaaaggtgaattcaacttataaaatgatgtaaatgttatgtcaaaatcaaccaatccgtaatgtattttaaaatgttaatatagttctgaagaagtataaatgaggtgttgaaatggctaaaaataagaaaacgaacgcgatgcgtatgcttgatcgtgcaaaaattaaatacgaagttcatagctttgaggtaccagaagaacatttatctggtcaagaagtcgcagaactcatacaagcaaatgttaaaacagtatttaaaacgcttgttctagaaaatacaaaacatgaacattttgtatttgttatcccagtaagtgaaactttagatatgaaaaaggcagctgctttggttggagagaagaaattgcagcttatgcctttagataatttgaaaaatgtaacgggatacattcgtggtgggtgttcgcctgttggtatgaaaacattgtttccaacagtcgttgacaaatcgtgtgaaaattatagtcatatcagtgtgagtggtgggcttcgaacaatgcaaatcacaatagctgttgaggatttgattacaataactaaaggcaaaattggagcagttatccatgaatgattaataacaacaaaaagtatggggcaagattaggagtgtgacagagatgaaatttttataaaattcatttctgccacactcctttttgattgaattagcattttacgatcataaacagtcattataattgagtatttgaacataaaaatgtaattttatcgtcacaatttgagtgtttgtgattgtttttggtaatttatgattgaaaagtgaaagcgtactcattataatacaaagtgagatggggtgatgatgataattactgaaaaaagacacgagttaatattagaagaactttcgcacaaagattttttgactttacaagaattaatagatcgaactggttgcagtgcttcaacaatacgaagagatttatctaaactacaacaattagggaaattgcaacgtgtgcatggtggtgcaatgttaaaagaaaatcgtatggttgaggcgaatttaactgaaaaattagcaacgaatcttgatgaaaagaaaatgattgctaaaatagcagctaatcaaatcaacgataatgaatgcttatttatcgatgctggttcatctacattggagctaattaaatatattcaagcgaaagatatcattgtggtaaccaatggtttaacacatgtagaagctttacttaaaaaaggtattaaaacaattatgctaggtggtcaagttaaagaaaatacacttgctacgattggttctagtgctatggagatattaagacgatattgtttcgataaagcttttatcgggatgaatggattagatattgaacttggattaactactcccgatgagcaagaggcattagttaaacaaacagcaatgtcattagccaatcaatcatttgtacttatagatcattctaagtttaataaagtatattttgctcgtgtacctttgctagaaagtacgacaatcatcacatctgaaaaagcattaaatcaagaatcgttaaaagaataccaacaaaagtatcactttataggagggactttatgatttatacagtgactttcaatccttcaattgactatgtcatttttacgaatgattttaaaattgatggtttgaacagagcaacagcaacatataaattcgctggggggaaaggtattaatgtctcgcgcgtcttaaagacattggatgttgagtcaactgccttgggatttgcaggtggatttcctgggaaattcattatagatacattaaataacagtgcaattcaatcgaattttattgaagttgatgaagatacacgtattaatgtgaaattaaaaacaggacaagaaacagaaatcaatgcaccgggtcctcatataacgtcaacacaatttgaacaactgttacaacaaattaaaaatacaacaagcgaagatatagttattgttgctggaagtgtaccaagtagtattccaagcgatgcgtatgcgcaaattgcacaaattacagcacagacaggtgctaaattagtagtcgacgctgaaaaagaattggctgaaagcgttttaccatatcatccactatttattaaacctaataaagatgaattagaagtgatgtttaatacaacagtgaactcagacacagatgttattaaatatggtcgtttgttagttgataaaggtgcgcaatctgttattgtctcgcttggcggtgatggtgctatttatattgataaagaaatcagtattaaagcagttaatccacaagggaaagtggttaatacagttggctctggtgatagtacagttgcaggcatggtggctggaattgcttcaggtttaacgattgaaaaagcattccaacaagcagtcgcatgcggtactgccacggcatttgatgaggacttagcaacacgggacgctatagaaaaaataaaatcacaagttacgattagcgtacttgatggggagtgaaaataatgagagtaacagagttattaacaaaagatacaatagcaatggatttaatggcaaatgacaaaaatggtgttattgatgagttagtaaatcaattagacaaagcaggtaaattaagtgatgtcgcgtcatttaaggaagcgattcacaatcgagaatcacaaagtacaactggtatcggcgaaggtattgccattccacatgccaaagtggccgcagttaagtcaccagctattgcgtttggtaaatctaaagcaggcgtagattatcaaagtttggatatgcaaccagcacacttattctttatgattgcagcgccagaaggtggcgcccaaacacatctagatgctttagctaagttgtctggtattttaatggatgaaaatgtacgtgagaaattattacatgcttcatcacctgaagaagtactagcgatcatagatgaggctgatgatgaagtgacaaaagaagaagaggcagaagctgaagcacaacaagttgcaactgcagaacaatcatctaaacaatctaatgagccatatgtgttagcagtaactgcttgtccaacaggtattgcacacacatatatggcacgtgatgcattgaaaaagcaagcggataaaatgggtattaaaattaaagtagaaacgaatggttcaagcggcattaaaaaccatttaactgaacaagatattgaaaatgcaacaggtatcattgttgctgctgatgttcatgttgagacggatcgcttcgatggtaaaaatgtcgtagaagtaccagtagcagatggtattaaacgcccagaagaattaattaataaagcattagatacaagtcgtaaaccttttgttgcccgtgatggtcaaagaaaaggtaactcaaatgacagtcaagaaaaattaagcccaggtaaagcattctataaacacttaatgaacggtgtttctaacatgttgccacttgtaatatctggtggtattttaatggcaattgtatttttatttggagcaaattcatttaatccaaaaagctcagagtacaatgcgtttgcagagcagctttggaacattggtagtaaaagtgcattcgcgttaatcattccaattttatctggattcattgcacgtagtattgcggataaacctggtttcgcttcaggtcttgtaggtggtatgttagcaatttcaggtggttcaggatttattggtggtattattgcaggtttcttagcaggttacttaacacaaggtgttaaagccatgacacgtaagttaccacaagcattagagggattaaagccaacattaatttatccactattaacagtgacggctacaggcttattgatgatttatgcctttaatccaccagcatcttggttaaatcatttgttattagatggattaaacaatttatcaggttctaatattgtattattaggtttagttattggcgctatgatggcgattgatatgggcggtccattcaacaaagcggcatatgtttttgcaacaggtgcgttgattgaaggtaatgcagcaccaattacagctgcaatgattggtggtatgattccaccgttagcaattgcgacagcgatgttaatttttagacgtaaatttacaaaagaacaacgtggttcaattatccctaactatgtgatgggtatgtcatttattacagaaggtgcgattccatttgcagctgccgatccattacgtgttattccttcaatgatgattggttcaggtataggtggcgcaattgctttaggcttaggttcacgaattactgcgccacatggtggtattattgtaattgttggtactgatggtgcacacttacttcaaactcttattgcacttctagttggcacattagtttcagcattaatttacggtttaatcaaaccaaagttaactgaaacagaaatcgaagcttcaaaatcaatggacgagtagttttaatgatgtaaaatgattgttagcaaagagcttcatattaagttgtatgttcaatgaatatatgttagttttatatatcgtgttaacggtagcttatacaaagctgtaaaaacactttctattaattcagtttttatgaattgatatgaaagtgtttttatttttagataaatgaatgaagaaatagacaccacaaatgtatagacttttttaatattttgcaaaaagttatgccaaacgaagcagatatagtaaaatatgagtgtcttaaagtgaaaatttataaataaagaagggtttatacgtgtcagaattaattatatataacggcaaagtttatactgaagatggcaaaatcgataatggttacattcatgtgaaagatggacagattgttgcaattggagaagtggatgataaagcagcaattgataatgatacgacaaataaaattcaagtgattgatgctaaaggtcatcatgtattaccaggttttattgatatacatattcatggtggttatggtcaagatgcaatggatgggtcatacgatggcttaaaatatctatccgaaaatttgttgtctgaagggacgacatcatacttggccactacaatgacgcaatcgactgataaaatagataatgcacttacaaatattgctaaatatgaagcggagcaagatgttcacaatgcagcggaaattgtaggtatacatttagaaggaccatttatatctgaaaataaagttggtgctcaacatccgcaatacgttgtacgcccatttatcgataaaattaaacattttcaagagactgctaacggattaataaagattatgacgtttgcacctgaagttgaaggtgcaaaagaagcgcttgaaacgtataaagatgacattattttttcaattggtcatacagtagcaacatacgaagaagcagttgaagctgttgagcgaggagctaaacatgtcacgcatttatataatgcagcgacgccattccaacatagagaaccaggtgtttttggagcagcatggttgaatgatgctctacataccgaaatgattgttgatggcactcattctcatccggcatcggttgcaattgcttaccgtatgaaaggtaatgaacgtttttatttaattaccgatgcaatgcgtgcaaaaggtatgcctgaaggagaatatgatttgggtggacaaaaagtaactgttcaatcgcaacaagcacgtcttgcaaatggtgcgcttgctggtagtattttaaaaatgaatcatgggttacgtaacttaatatcatttacaggtgatacattagatcatttatggcgagtaacaagtttaaatcaagccattgcattaggtatcgatgatagaaaaggtagtattaaagtaaataaggatgcagatcttgttattctagatgatgatatgaatgtaaaatctacaataaaacaaggcaaggttcacacatttagctaataaataatcataattaaatgtatgcaatagatttaatctgttaacataagcactttatattatgataaaatagaagcaataacatttttttctgggggtgtctaaatgggaaggcgataacatgtagttgtaatttaagtcatagtgataaatttgaatgcgtgttacccatgagtgacacatataacatggaggtgaatccctagaaatagggaattaattggaaacttcgaccataattagtttgattatatttattctattaattgcattaaccactgtatttgttggttcagaatttgcattagtaaaaattagagcaacaagaattgaacagctagcagatgaaggaaataaacctgctaaaatagtaaaaaagatgattgctaatctagattattatctttctgcttgtcagttaggtataacagtaacatctttagggttaggttggcttggtgaaccaacgtttgaaaagctattacacccaatatttgaagcaatcaatttaccaactgcattaacgacgacgatttcgtttgcagtgtcatttataatcgttacgtatttgcatgtagtacttggtgaattagcgcctaaatctatagctattcaacatactgaaaagcttgctttagtatatgcaagaccattgttctatttcggtaacattatgaaaccattgatttggctgatgaatggttctgcacgtgttattattagaatgtttggtgtaaatcctgatgcccaaactgatgcaatgtcagaagaagaaatcaaaattattattaacaatagttataatggtggagaaatcaaccaaactgaattggcatatatgcaaaatatcttttcattcgatgaaagacatgcaaaagatataatggtacctagaactcaaatgattacactaaatgaaccttttaatgtagacgaattactagaaacaataaaagaacatcaatttacgcgttatccaattactgatgatggtgataaagaccacattaaaggatttattaacgtcaaagaatttttaactgaatacgcttctggaaaaacgattaaaatagcaaactatatacatgagttgccaatgatttcagagacaacacgtatcagtgatgcattaattagaatgcaacgtgaacatgtacatatgagtcttattatagatgaatatggtggaacggcaggtattttaacgatggaagatattttagaagaaatcgttggagaaattcgtgatgaatttgatgatgatgaagtgaatgatatcgttaaaattgataataagacattccaagtaaatggcagagtactattggatgatttaactgaagagttcggtatagaatttgatgactctgaggatattgatacgataggtggatggttacaatctcgtaataccaatttacaaaaagatgattacgtggatacaacttatgatcgctgggttgtttcagaaatcgataaccaccaaattatttgggtgatattaaactatgaatttaatgaagcgagacctactatcggacagtctgatgaagatgaaaaatcagaatagatattaatatataaaccaactaagaatgatttaattcatttttggttggttatttttttgactaaaattaatgaaaagtgaaaatagtattggaactcaatatctttaatgatttaatgaataatttttattgaaagcgataattcgtattaattgagtttgttgaaaaatttagggtaatgtaaagatataaaagatacatagattggagagatataaagatgttgaatgagatacaaatattaaataatggatacccgatgccttcagttgggttaggtgtttataaaatctctgacgaagatatgactaaagttgtaaatgctgcaattgacgcaggctatagagcgtttgatacagcatacttttatgataatgaggcttcactaggacgagcattaaaggataatggcgtcgatagagaagatttgtttataacaacgaagttatggaatgactatcaaggttatgagaaaacattcgaatatttcaacaaatcgattgaaaatttacaaactgattatcttgatttatttctaatacattggccttgtgaagcagatggtctatttttagaaacatataaagctatggaagaactttacgagcaaggtaaggtaaaagcaataggtgtatgtaattttaatgttcatcatctagaaaaattaatggctcaatcaagtatcaaaccaatggtgaatcaaattgaggtacatccatattttaaccaacaagaattacaagaattttgtgatcgtcacgatattaaagtgactgcatggatgcctttgatgagaaatagaggactactagacgaccctgtcattgttaaaattgctgaaaaatatcataaaacaccagcacaagttgtattacgttggcatttagcacacaatagaattattattccaaaatctcagacacctaaacgcattcaagaaaatatagatattttagattttaatttagaattaacagaagtagctgaaattgatgctttaaatagaaatgcaagacaaggtaaaaatccagatgatgtgaaaattggggatttaaaataactggatgttaaattttacgtttatgaatgccttttaatgtgtacattaaaataaatgagttggtttttactatttgataaaacaatactcaggtacattcaaaatcttttaaataaaaaggatggacatagatgaaaattagagtcgtcattccttgttttaatgaaggggaagtcattacacaaacacatcaacaattaactgaaatactttcacaagatagtagtgtgaaaggctatgattataatatgcttttcatagatgatggtagtacggataccactatagatgaaatgcaacatcttgccacaatagataggcatgtcagctttatttcttttagtagaaattttggaaaagaagcagctatgattgcaggttaccagcatagtactgaatttgatgcagtcatcatgatagattgtgatttgcaacatccacctgaatatattccgaaaatggttgaaggttttatggaaggctatgatcaagtgattgcaaagcgtgatagaagtggtgaaaattttagtcgcaaaacattaagccatttgtattataagttagttaattgctttgtagaagaagtacaatttgatgatggtgttggtgattttagacttttaagccaaagagctgttaaatccattgcatcacttgaagaatataatcgattttcaaaagggttatttgaatggataggctataatactaaagtgtttacgtatcaaaatgttgagagacaaaaaggggaatctaagtggtcctttaaaaagttatttaattatggtattgatggattgatttcctttaatagtaaacctttgagaatgatgatttatcttggcttgtttatcttttcaataagcgtgttatatattatctatttattcatcaatattatgatatctggtgttaatattccgggatatttttcaacgattgcagctattttattattaggcggcatacagttaatttcaattggtgttgtaggtgaatatattggcaggatatattatgaagttaaggcacgtcctaaatatattattcaagctacaaatctttcaagtcttgaaaatgatgagaaggatacccataaagtttattctaaataaacaaaaaaagaagccctcattaatgggagcttctttttagtctttgcattttattttataaataaatcggattatgacgtaatgtctaatttgtgtaatgttacagtcatcgtagttcctacatctatatcactgcttacactgatttttgcgttattttgttgcgcgagttcattagctatatataagcctaatccagaaccacccgtttttgtattacgagagttttctactctgaatgtacgttcgaatatacgttcttgtagttctggtataatgccaataccttcatcgctaatagcaatgtcgatagtatcttgatcttcgttttcactaatattaatatcaatgcgactaccaacatttgaaaattttagcgcattatcaagtaagtttgttaaaatacgctcaagtggcgttcgatattgataaaatgcatcaatttcgttacagaaattcacttctaatgtgcggttttcatgtttgatacgttgctcatatggttgcaatattgatacaagtaattggtctagttgtattaattctgggggatatgttttacctgtatttaaagtgataatatgagtcatatcatcaaataatgttgataatctgtttgcttgtttaattaatatgtcgtatgactctttaatctcatgatccttagtgattataccatcacgtagtccttcagaatatgaaataatgcttgctaaaggtgtttttaaatcatgggctaagttttgaatcagttctgttttttcttgttgttcggatttaatttgattcatttgttgcgtaatttcagaagccattttattaaaagattgatttaattcataaatttcttttggtgaattaaacgttttatcattgcttgcgtaatttccgttagcaaattgcttagtttttatattaaactgcttaattttttgtataagtggattaataaaaatactacatattaataaggttaaacagcttgtaattattgtcgttaaggtcaaagttagtgtcatatggccgttaaaccacattaaaatatatgcaattgctaaaatagttgaagttaatagtatactcgatacgacgccaataatgatttgacttctaattgataacaccattatcggctcctttcaaatttatatcctaatccccatacagttgtgatggtatatgttgtaaagctctctttttctaatttttctctaatacggtgtatatggacattcacggtattagcatcttcgtaatagtcatatccccaaactttttcaagtaattctgatttagaaataacttcattttctctagaagctaaataccacaataactcaaattccttaatacgcatagggacttcgtgaccatttacagtcacaactttacttaagttaataagtgttaattcatcaaacgacagttgttcaactggttgatgatggtatttcttcattcttgtaagtaaattattaatacgtaaaacgagttcccttggactaaatggttttttgacatagtcatctgcacctaaagttaaggcgtaaatggtatcatgttcttgtgttttggcagttaaatagataaaggggatatctaatttttgccttttcatttctttgacaatgtcgtaaccattaacttctggcatcatgatatcaagtaccatgatatcaatatcatttgatagtaaagaaattgcttctttaccgctagttgtcgttgttactttgtaaccttcatattcaaaataggtttgacaaatgtctacaatgtcttgttcatcatccacgatcagtaagtgggtcatctattttttcacctctgttcttacgacctctaaagtaattaatgatttctttaagtgaaatctgttttaacaatgagtgactcattagtaaaaggataaagaaagttaattgaagaggatacgtaaatatcatatctgctaagatataatttatcataacaaaggctccaaagaaactagcagcatatgcaaaaactccaaaaattaaacctaatccaattgcaatctctccgagtgggacaacaatatcaaataatgacgtcgtatgtgcaactatatttgcgaaaaaccacttataccactctggtgaatcagtattgttagcgatgactggtactaaacctttcagcgtaaatccgcccgttaatttttcgtagccttgcattaacataacaatacctgaacccacacgaatgataaatgtaacgagtagcaataatttattcatgatgttcacattctttctatttattgtgtgtaatttatataaacataagattaagcaacataatgcgatttgtagtgttatgtgaacaggaagtgtttgagctcatgggttgcttaagctaaacaaacctcaagctctaaaaaaatttacttatgtgctctgcaatcttatgggatttaatagttgtatatatattgaaaaaaggaaagtatgatttctacaagctaggggggctgtgaaatcatacgctttccattgagtaatgagtgtaatgtatattttaaaaatttgtaatgtatagtaatagtatgttgtaaataaaagtttaactcagaaattgattattttaatttagcgccgccgaagatgacgtgagcttttttacaatagattgttacttcatcatatttgcttaaatctacatttttaagatcaaatgtttgtttttctttatcgtagtcaaccattgcgatttctttaccgtttttaatgtcgccattttttgttaggtagacgtataaatctggaccttttgatgatttgtagttagtaagcattaatttaccatttttaatctcagctttaccttcaacagtttcaccgtttttagaactgaatgtacctgttaggtgttttgttttatcagttttaacattgctatcttctgactttgttttttgttcagttttgttaccttgatcttgtgaattagaattaccacaagcacctaaagctaatgttgtgataacagcaccagctgctaaaaaatattttgtattcatgctaactcctcatttcttcaatttgataagttaagtttaaaatgaaggcaaataatatgccattaactaattcttaacttcgtttaaatatcgcttaactaatattgaagaaagaataatttgaaaatgaaaataattgtctgatttaaataaataggggtcaaaataagaggagggcgtttttttaagtaaggaaatatttatctgaactagataacactataaaacacttctgatattttgaactaagaatatcagaagtgtttaatagttttggtattaaaatttataaaccttttgccacaataaaaacaacaagaaaataagatagacgattaaatacaagtaccaatatggtgttaaaaccatcataacgataaatgaaatgttaataatgataagtcctttaatcattagtttctttattttgttattattttcagcagtttcatctaagctattaaatgttgaaataaacaacataataccaccaatgatgaaaatggcaggggctaaaaatggaatagacatatatattgattgtgtacttgaaaagtcggtaacacgttgcgttaaactgacaacaatcgttaatatgatagcaataaatttttggtctgtaatgtatacaggttttaattttttatcaatgtaaaactgtagtatcgtccaaatgataaacatcgttatagtacacagagtaataaagttatatttatcaattatgaatgtatttataaaggcgtttatcgtaatagataacaacattgcacttaatgataaatgttgcatttgatgcctatataaattgaatccagttataagtacgacgatagcaatattaattaatatatatacaatcatgatggactcctgttcgttatacttcaatcaactattatatcaattaatatattgttattcattagatatgacttgcaaaaagtaaaataagttatcctttatacaccttttttattgctccaaagtaatgtatgaagttgtggtaacacataaacgtgattcatatcattactttgcataactaaatccaccaactgctcgtagcgttctaacaacttttcggtatgattatctacgctgtctgataaatatgggttaccaacttgtaaatagaagggaatatctggataacggtggtgtatcattttggcaaaatcataatctttatcgtcgaatacaactacttttaagtttaatgatgaaggtacgcattgtgtaatcacttcatctaacttttttaaatcaggtgtcatagttgaacttggtggttttggactaatcgttaaatcatcaatttgtgtcatccaaggttggaatttactgccttgtgtctccagtgcgctgaaaatacctttatcttgaaataagtcaactaactcttggatacctttaattaatgctgggttaccaccagaaattgtaacgtggttaaataaatcgccaccaattcgttttaattcatcataaatttcttcagcggtcatgagttttatatcgcctttagcactaccatcccaagtaaatgcagaatcacaccagctacagcgataatcacatccagctgttctcacaaacatcgtttttctaccgattactcgaccttcaccctgaatggttggaccgaatatttcgagtacaggaattttagccattagttacacctgttcctttggtctaaatacgacataacttgttggtgtttctcttacaaatacttgaatacattttggttggtgttcgagcgatgccaaattttctttaacaatttgataaattgtttccgctacgatttcagttgaagggattttgtttttaaaagcaggtaagttatttaacagttgatggtcaaatttaccgtgtatcatctttttcaaatggctaaagttcactaagaagccagtgtcatctagtttatcaccgacaattgttaaattaacaaagtaagtatgaccatggacattttgacaaatacctgcttcttcacatggaatgtgatgtgcagccgaaaaattaaaatctttatttaattcgaattgatatggatgcgttgtactaggatagatttgttgtaacattttaaagcgctcctttactttcaagatattgatttagtccacgttgacgtaaatgacaagctggacattcaccacagccatccccaatgataccgttatagcatgttaatgtttttgtacgaatataatctaaaacttcgagttcatcacttaatttccacgtttctgctttgtttaaccacattaaaggagtatgaatgacaaaatctttgtccatagctaggcttaatgttacgttcattgattttataaaactatcgcgacagtctgggtagcctgaaaagtctgtttcacatacgcctgtaataatatgcttagccccaatttgataagctagagcgcctgcaaacgacaagaaaagtaaatttctagctggaacaaatgtattaggtataccatcttcattattagtaatttccatatcatgttgtgttaatgcgtttggagtaagttgtgataataatgacatatctaaaacgtgatgtttcattccttgatcttgtgcaatttgttttgcgacttcaatttcagtatcatgtctttggccataattaaacgttacgagttcaacttctttgaaatgtttttttgcataaaagagacatgttgtactgtcttgaccaccactaaagacaacgatggctttttcattatttaatacactttccattttgtaattgctcctatcattaataatattaataaagaggttaatggcattgataagcccgtttttaatttataaaataaaaaaagcctatctccataaaagatagacgaaagaaatgggttgctcctataatatatattaaaggtttaccaacgaatgtttgaaatttcaatgtctagttttttatagagggtttcagctaggaacctctgatattcatttatgtacgatgaatagaatataccatatattagttaaaatcaaggtcaggataatgacaatgcttttaaagttttagctacatccaatacatattataaaaataaaacacatttagaacggagtatacaatgattctagtcatagataataatgattcatttacatataatttaatagactatattaagactcaaacgaaactaacagttcaagttgttggtattgataatctgctgatagaagacgtcattaatatgaagccaaaagcaattgttatttcgcctgggccgggtaatccggatgattatcctatcttgaatgaagtgttagaacaattttatcagcgtgtacctatactaggtgtatgtttaggatttcaatgtatcgtgtcttattttggtggaaatatcattcacggctatcatcctgtacacggacatactacacagttacgccataccaatgaaggtatttttcaaggactgcctcaaaatttcaatgtaatgcgttatcattcattaattgctgacggagcgacttttccaaattgcttaaagattacagcaaaaaacgatgaagcgattattatggcatttgagcatattagatttccggtttttggtgtgcaatatcatcctgaatctattttgagtgaatacggttatcgacaagttgaattatttttatcgaaggtaggtgattactgtgagaatagaatataattatcgctactatttaactgaaaatgaatataagcaataccatattcaattaaagggatttataaagaagtatgttgctactaagttggctgatgtgggagaagtgatacactttgcacaagcgcagcaacgacaaggtagatatgtctcgttatatttaagttacgaagcggcaaagtattttaatcatgctatgtgtacacattcattagctaaagatgatatttatgcagcagcttatagttttgaaaaagcggaaagcataaattcaacatatgaacatcaaacttcttatgtatcaaagtatcatttttcatttgttgaatcttctgaggttatgatgactaatattaaacgtgtccaacaagcaattgttgaaggcgaaacgtatcaagtgaactatacggcgcgcttaacggataacatttattatcctattagtactttatatgaacgattaactcaatttagtaatggtaattatactgcgttattacaaactgatgaaatccaagtagcgtctatctcaccagaattattttttcaaaaaggacaatttaacaatgtcgataacgttatcataagcaaaccgatgaaagggacaatgcctagaggtaaaacggaagctgaagatcaacagtattataaaacattgcaaacttcttcgaaagatcgtgcagaaaatgtcatgattgttgatttactaagaaacgatatagggagaatatcacagagtggctcaattaaggtgtataaactattttttattgaggcatataaaactgtatttcaaatgacttcgatggtaagtggaactttaaaaaataatacagacttaactcaaattttaacatcgttatttccttgtggttcgattacaggtgcaccgaaactgaatacaatgaaatatattaaacaattagaaagttcacctcgtggtatatactgcggagcaattggactattacttccaactgaagatgataaaatgatttttaatattccgattcgcactattgagtataaatatggacaagcgatttatggagtcggagcaggtattacaattgattctaagccaaaagatgaagtgaatgaattttacgcaaaaaccaagattttggagatgttataatgcaattatttgaaacaatgaaaattgataatggacatatccctagacttacttatcatactaatcgcataaaatgttcttctgagcgattaaactttaaatttgatgaacatgcatggcgaaatgaattaaacgatgtaacaacaaagtatcacagtggtcaatatagacttaaaatcgtattaaatgctgaaagcaaatttgaaacgatagtgtcacctttacctgagaaaagtagttttacagcaaaatttcaagtgttgcccaaagtagttaatccaacttttataaaaaataaaacgacagaacgaaagcatttagcacacaatcatgaaacagatttaatattgctaacttcagaggacggcaaggtccttgaatttgatattggcaacattgtcattgaagaggatggaaaatggtacacaccaagttataaagatgatttcttaaaaggatgcatgcgtgattatttaatagatagtgacaaacttgttgaaaaagactttaataaaaacgaattgatttataaatatcataacaatgagatacgtttatttttgataaatagtttacgagaggttgccgatgtccacctttgcctttaaaattagtatgataataaagtagaaaatgatgtgaaaacaaatttaaaaattaaatggggccaaatatgattattgtttatattgtgctgttgttaattcttgtatacgtaaattatcgattagtgaatcgattgctatctgaaaatagaatatatgttgttcgtttgatagcaacaattactactgttataagctttatccttgtatacgcattaattcacgaacttatgccttttgttgtgcgggcaatggatttaatgtaccaccagtaaatttagtgagtaggtaaaatgaactattcaatcgattctataattaaaaatgaaagtaaagtaaccaaatattgaagaggtgtacaaatgaaaatatatagtcaaggtgaccaagccattgtagtcgcaattgaaaaagaagtatctaaaagtttaaccgaagatttattaacacttcgctcatatttaattgaacaaaattatccatttattatagaaattgtgccatcagaatcagacatgatgattgtctatgacgcaagggatatgattaaacaccataatatacaatcaccttttttatacatgaaagcactaatagaatcgattcatttaaacataaaacatgattttaaccagcaagatttgattgaaataccaattgtgtatggttcgaaatatggtccggatttagaatcacttttaaaacattacaaaatcaagctagaaacttttattgaattacattctaaggcgcaatattttgtttcgatgatgggatattcacctgggtttccttatttaactggattaaataagaaattgtatattaatcacacgagtaaacagaaaaaattcattccagctggttctgtagtacttgaagggaaaaaatgcggtattgtaactacggatacaattaatgattggttagttattggttatacaccattatcactttttaatccgaaagaatcagatttcgcacgcttaaagttaggcgataatattaaatttagacctatcaatgaaaatgaattagaagtaggagcgtttaaagatgtcaatcataattgaaaaaagtggcttattcagtagctttcaggactttggcagaaggggatatgaacatgatggtgtaattccatgtggtgcacttgatactttagcacatgaaattgctaatcgattagttgcaaatgacaagaatgaagcaactttggaaatgactaataaaatggcaacgattcgttttacagaacctacgctgattgcattagcagggggtaatgtcaaagcttacactgagcatatgactatatctccatataaattgtatttgttagataaaggcgatgttttaaagtttagagaaacaagttatacatcgcgagtgtatttagctgtgggaggcggatttgaattagatgcatggttaggatctaactcaaccgactttaatgtaaaaattggtggttttaaaggtagaacattacaagatggcgatgaaataaagcttaagagagattatacagctcgtcatcataagttatttgaaaaccttgctcacacgaaacaaacagattggggtattgatggatacgccttgtcatttaattatatgtctgatgtatttcatgtcgttaaaaataaaggtacggaagattttaaagaagatgccattcaaagatttgtgaaacatgattataaagtaacgagcaaagcaaatcgcatggggatgatgcttgaaggtgaaaaaatcaaagctttttatgaagatatgccaccgtatcagactgtcaaaaaaggaacgatacaaattaagcgtgatggcacacctattatcctattaaatgatcattatacgctaggtagctacccgcaaatcggtacaatcgcaagttatcatttaacgaaattagcacaaaaaccgcaaggatcacgtttgaaatttcaatttatagatattttaacggctgaaaagaaccttgttaagtatagtaactggttaaaccaattattccatggaatagaatatagaatgcaattagaaatgatgaaataatatttggtacgtagctcatactcgagtccgatgcaaataatttcctcctaatgtataatgaaataatactgtgttttatctgcgaaatgtatcattttctaattcgtttcacagtaaaatgaaaagataaagtgtgtttttacttgaattttgactaaaattactctatatttattaattgagctatgcttattattacaatttgattacaaattttaaatttgttaattgaatgataatattaaataaagaaacttacacaagcaaatatgagttgtagcccaaaatacttgttaaatcaaagttgaaagctacaaataacgaaaattataaacttgaatctgaaagtaattactataattatgacaatgttaacttttaaacgcacttattaattaactacataatgttaatatctaatttattcaagtactttcgcaagatttattatctaaataacgggggaaagaatcatgagttcacaaaaaaagaaaattagtctttttgcgttcttcttattaaccgtaataacgattaccttgaagacgtatttttcttattatgttgatttttctttaggtgttaaaggtttagtacaaaacttaatattattgatgaatccttatagtttagtagcactggttttaagtgtgttcctattctttaaaggcaaaaaagcattttggttcatgttcataggcggcttcttattgacgttcctattatatgccaatgttgtgtactttagattcttctctgattttttaacgtttagtactttaaaccaagtaggtaacgtagaatctatgggtggtgcggttagtgcatcattcaaatggtatgactttgtttatttcattgatacgttagtttacttattcattttaatatttaaaacaaaatggttagacacaaaagcatttagtaagaaatttgttcctgtcgtaatggcggcttcagtagcattattcttcttaaacttagcttttgctgaaactgacagaccagaattattaacacgtacatttgaccataaatatttagtgaaatatttaggaccttataactttacagtatacgatggtgttaaaactatcgaaaataatcaacaaaaagcgctagcatctgaagatgacttaacaaaagtattaaattatacgaaacaacgtcaaacagagcctaacccagaatattatggggtggcaaagaagaaaaatattattaagattcatttagaaagtttccaaaccttcttaattaataaaaaggttaatggtaaagaagtaacaccgtttttaaacaaattatcaagtgggaaagagcaattcacatacttccctaactttttccatcaaacaggtcaaggtaaaacatctgactctgaatttacaatggataacagtttatacggtttaccgcaaggttctgccttttcattaaaaggagataatacgtatcagtcattaccagcaattttagatcaaaagcaaggctacaaatctgatgtcatgcacggtgactataaaacattctggaacagagaccaagtatataaacactttggtatcgataaattctatgatgcaacatactatgacatgtcagataaaaacgttgtaaacttaggcttgaaagacaaaattttctttaaagattctgctaattatcaagctaagatgaaatcaccattctattctcatttaattacattgactaaccactatccattcacattagatgaaaaggatgcaactattgagaaatcaaacacaggtgatgcaacagttgatggttatattcaaacagcacgttatttagacgaagcattagaagaatatattaatgacttgaagaaaaaaggattatatgacaattcagtgattatgatttatggtgaccactatggtatctctgaaaaccataacaatgccatggaaaaactattaggtgaaaaaatcacaccggctaaatttacagatttaaacagaactggtttctggattaaaatccctggtaaatctggtggtatcaataatgaatatgctggtcaagtcgatgtaatgccaacaattttacatttggctggtatagatacgaagaactatttaatgttcggtactgatttattctctaaaggtcataatcaagtagttccattcagaaatggtgactttataacaaaagattataaatatgttaatggtaagatttattctaataaaaataatgaactcataactactcaaccagctgatttcgaaaagaataaaaagcaagttgaaaaggatctcgaaatgagtgacaacgtgcttaatggtgatttgtttagattctacaaaaatccagacttcaaaaaggtaaatccttcgaagtataaatatgaaacaggacctaaagcaaactctaaaaaataatatctaaacacgaactcggattgataaaatatcaatccgggtttttattatgttcttttatattatgttttacattatatgtgttgataaaaaggtatattataaagatcattagcatagtcatcaaagccttaacaagttttatttatagttgaagcaacaatatattaaattatgacacttaacggtatcgatttcttttgatttcaaaaaggtgtataatgtatagaactgatttaagtacgtagagatttcaacagaagaaggaagatgggtatggaagcatataaaattgaacatttaaataaatcttatgccgataagactatattcgataacctagatttatcaatttcagaaggtgaaaaaataggtttagtaggcataaatggtacagggaaaagtacgttgttaaaagtaattggtggtattgatgatgattttacagccaatgttatgcatccaaatcaatatcgaattcgatattcgtctcagaaacaggaccttaatgaagatatgacagtttttgatgcagtattaagttctgatacaacaactttacgcatcatcaagcaatatgagcaggcagtacaagcttatgcggatgaccaaagtgataaattgttcaagcgaatgatggatgcgcaagatgctatggatcaacatgatgcttgggactataacgctgaaattaaaacaatcctctcaaaactaggtatacatgatactactaaatacattaaagaattatccggcggacaacaaaaacgtgttgtacttgctaaaacattaatagaacaaccagatttattgttattagatgaacctacgaaccatttagacttcgaatcaatcagctggttgatcaattatgtgaagcaatatcctcatactgttttattcgtaacccatgatcgatattttttaaatgaagtttccactagaattattgaactaaacagaggtaagttagcgtcatatcctggtaactatgaatcttatattgaaatgcgcgctgaaagagaagtaacacttcaaaagcaacaacaaaagcaacgagctttatataaggaagaacttgcttggatgagggctggagctaaggctcgtactacaaagcaacaagctagaattaatcgatttaatgacctagaaaatgaagttaaccagcaatataaagacgataaaggtgaattgaatcttgcttattcaagattaggtaagcaagtgttcgaattagaagacttatcaaaggctattaatgataaagtattatttgaacatctgacggaaattattcaaaaaggtgagcgtattggtgttgttgggccaaatggagctggtaaaacaacactcttaaatattttgagtggagaagaccaacaattcgaaggtaaattgaagactgggcagacggttaaagtagcttattttaagcaaacagatgagaccctggatagagatattcgtatgattgattatttaagagaagaaaatgagatcgcaaaagaaaaagatggaacctcggtatctattacacaacttcttgaacgatttttatttccaagtgcaactcatggtaaaaaagtttataaattatctggtggagagcaaaagcgtttgtatttattacgtctactcgtacaccagccaaatgttctgttgttagatgaaccgacaaatgatttagatactgagactttaacaatacttgaagattatattcatactttcggtggtacagtgattaccgtaagccatgatcgctacttcttaaataaagttgcacagtcatattggtttattcatgatggtcagatggaaaagattatcggaacttttgaagattatgaaagttataaaaaatcattagataaaaataaatccacattgaagcaacaatctaaatcttctacaactgtacgtaagaaaaatggtttatcatataaagaaaaattagaatatgaacaattgatgaaacgcatagaacaagcggaagtaagaatggaagaaattgatgtgctcatgattgaggcaagtgcagattatgggaaaattaaagaattaaacgaagaaaaagaacaacttgaaattcaatatgatttagacatcacaagatggagtgagttagaagaaattaaagaacaacaataaggggtcaatttatgatgcaacaaacattatcgcattactttgggtatgaaacgtttcgaccaggacaagaagaaattattagcaaagtattagaccatcgtaatgtgcttggtgtcttaccaactggtggaggtaagtctatatgctatcaagtaccaggtttattgttaggtggtacaacaattgtaataagtccactaatatcattaatgaaagatcaagtggatcaattaaaagcgatgggaattcaagctgcttttttaaatagtagtttgactcaaaaagagcaacaacgtattgaaaaagcattatcaaatggagaaattcaatttttgtatgttgcaccagaacgatttgaaaaccgatattttttaaatatgcttcagcgtataaagattcacttagtcgcgtttgatgaagcgcattgtatttctaaatggggtcatgatttcaggccgagttaccaaaatgttatttcaaaagtatttacgttacctcaagattttacaataatagcgttgacagcaactgccacggttgaagtacagcaagatattagagaaaagttaaatatcgctcaaactgatcaaattaaaacgagtactaagcgtagaaacttaatttttaaagtaaatcctacttatcaacgtcaaaaatttatattggattatattaaaacacacgatgaagatgcaggtattatttattgttctacacgtaagcaagttgaagagcttcaagaagccttagaaagtcagaaaattgaaagtgttatatatcatgcaggtttgagcaataaagaaagagaagaagcgcagaatgatttcttatttgatcgtgttaaagtagtcgttgctacaaatgcttttggtatgggtattgataaatccaatgtacgctttgttattcattataatatgcctggagatttagaatcttattatcaagaagcgggtcgtgcaggtcgtgacgggttgaaaagtgaatgtattttgttatttagcgaacgcgatatcaatttacacgagtattttataacagtctctcaagctgatgatgactataaagataaaatgggcgaaaagttaactaaaatgattcaatatacaaaaacaaaaaaatgtctagaagcaacaattgtccattattttgaaccgaatgaaaaattagaagaatgtgaacaatgtagtaattgtgttcaacaagataaatcatataatatgacacaagaagctaagatgattattagttgcatcgctcgtatgaaacaacaagagagttatagtgttatcattcaagtgttaagaggagagtcaacagattatattaagtataaaggttatgaccaaatttcaacccatggtttaatgaaaggttacacaacatcagaattaagtcacttaatagatgaattaagattcaaagggttcttaaatgaaaatgacgaaatattaatgtgtgatacttcaattaaaaaattactcagtaatgaagtagaagtattcacaacaccatttaagcaaaaagcgactgaaaaagtatttataaatacggttgaaggggttgaccgagtattattcagtcagttggtagaagttcgtaaaaagttaagtgacaaattaacgatagcacctgtaagtatattttctgattacacgttggaggaatttgctaaacgtaagcctgcttcgaaacaagatatgattaatattgatggcgtaggtagttacaaattaaaacattattgtccagcatttttagaaacgattcaaaattataaagccaaagtatagtgaagacacctagtaagcattccttgttttactgggtgtttttttgaattcaaggtaaaataacactatttcttaactggagattacctattattcattattttattaaaaaagttcaaggataaatcatttaaatttgaaaattgtaataaacgtggttaaatagggaatacatacatataatctcggttttatgctatgagaaaaaaagaggtggcaaagtgattaagtttaaaaatgtaactaagcgttatggcaaacatgttgctgtcgataacattagtttcaatattaatgagggtgaattttttgtgctaattggaccttcaggttgtggaaaaactacgacattaaaaatgattaatcgactcattcacttaagtgaaggttatatttattttaaagataaaccaataagtgattatccagtatacgaaatgcgttgggatattggatacgtattgcagcagattgcattattcccacatatgacaatcaaagaaaatattgcacaagtgccacaaatgaaaaagtggaaagaaaaagatatagataaaagagtagatgaattacttgaaatggttggattagaacctgaaaaatataaaaacagaaaacctgatgaattgtcaggggggcaacgacaacgtgtaggagttatacgtgcgttagcagctgatccaccagttattttaatggatgaaccgtttagtgcattagacccaatcagccgagaaaaacttcaagatgatttaattgaattacaaactaaaattaagaagacaatcatatttgttacacatgatattcaagaggcgatgaaacttggtgataagatttgtcttttgaatgaagggcatattgaacaaattgacacaccagaaggatttaaaaataatcctcaaagtgaatttgttaaacaatttatgggtagtcatttagaagatgatgcgccatgtgttgaagagaacgcaattatccgtgacttggatattatgaaaccaatcgatgaggttacatctatgagcgcttatccaattgtttatgacaatcaaccaattgaagtattgtatcaacttttatcagagagcgagcgtgtcattgtcatgcaagaagatagcgtaggtcaatatgttattgataggaaagatatcttcaaatatttgtcccagaaaaaggaggtagctcaacatgactaactttttcgacatattgagtgaacgtaaggggcaactcttttcgacaatgatagaacatattcaaatatcatttatcgcattattgattgcaactgctattgcggtaccattaggtattttattaacgaagactaaaacgatatctgaaatcgtaatgaatattgcggcaattcttcaaaccataccatcgttggcattattaggtttaatgattcctttatttggtatcggtcgtgtgccagcaattattgcacttgtagtgtatgcgttgttaccaattttaaggaatacgtatactggaattaaagaagttgatccatcactcattgaagcggctaaaggtataggtatgaaaccatttagacgtttaactaaagtcgaacttccgatagcaatgcctgttataatggctggtgtaagaacggctatggtattaattataggtacagcaacactagcagcattaattggtgcaggcggactaggagatttaattttattaggtatagaccgtaacaatgcatcgttgatattattaggtgcaattccagcagccttattggcaattatatttgatttaattttaagatttatggctaaattatcttataaaaagttattgatgacgttaggtgttatagtgatgattattatactggctatcgctattcctatgtttgcacaaaaaggtgataaaattacgttagctggaaagcttggctccgagccatcgattattacaaatatgtataaaattttaatagaagaagagaccaaaaatactgtagaagtgaaagatggtatgggcaaaacagcatttttatttaatgctttaaaatctgacgatatagatgggtatttagaatttactggaacagttttaggtgaattaacaaaagaaccattgaagtcaaaagaagagaaaaaagtttatgaacaagctaagcaaagtcttgaaaagaaatatcaaatgactatgttaaaaccaatgaagtataacaatacgtatgctttagctgtaaaacgtgattttgctaaacaacataatatacgtacaattggtgatttaaataaggttaaagatcaacttaaaccaggatttacattggaatttaatgatcgtccagatggttacaaagctgttcaaaaggcttataatttaaatttagataacatacgtacaatggaacctaagttgagatatcaagcgatcaataaaggtaatattaatttaatagatgcatattcaactgacgctgaattaaaacaatatgatatggttgtgttaaaagatgataagcacgtatttccaccatatcaaggagcaccattatttaaagaaagctttttaaagaaacatccagaaattaagaaaccgttaaacaaactagaaaacaaaatatctgatgaagatatgcaaatgatgaactataaagtaacagttaaaaatgaagacccatatacagttgcgaaagattatttaaaagcaaaagggttaatcaaataacgaccaacgccacataagatgcgtaacaccaaattatatcttatgtggcgttgttatatttaaatctataattatgttcaatttaaacatgcaataatgattaaaaaatatgacatgttaaacacaatgtaagctattatgatgtgaaaatagtagcattgcattttagaaacatagagcgatataatgaatataagttttttgaaatttcagttaattctaaggaggttgtttttattatgaaagaacaacttaatcaactatcagcatatcagcctggtttatctccaagggcattgaaagaaaagtatggcattgaaggagatttatataaacttgcatcaaatgaaaatttgtatggaccatcgcctaaagttaaagaagcgatatcagcacacttagatgagttatattattatcctgaaacaggatcaccgacattaaaagcggcgattagtaaacatttaaatgtagatcaatcacgcattttatttggtgcgggattagatgaagttatattaatgatttctagagctgtattaacgccaggggatactattgttacaagtgaagcgacattcggtcaatattatcacaatgcgattgttgaatcagctaatgtgatacaagtacctttaaaagatggtggcttcgatttagaaggtattttaaaagaagttaatgaagatacgtcattggtatggttatgtaatccaaataatcctacaggtacatattttaatcatgagagcttagattcgtttttatctcaagtacctccacatgtaccagtaattatagatgaagcttattttgaatttgtgacagcagaggactacccggatacacttgctttgcaacaaaaatatgacaatgctttcttattacgtacattttcaaaggcgtatggattagcgggtttacgtgtaggatatgtggtagcaagtgaacatgcgattgaaaaatggaacatcattagaccaccatttaatgtgacacgtatatctgaatacgcagcagttgcagcacttgaagatcaacaatatttaaaagaggtaacacataaaaatagtgttgaacgcgaaagattttatcaattacctcaaagtgagtatttcttgccaagtcaaacgaattttatatttgtaaaaacaaagcgggtaaatgaactttatgaagcacttttaaatgtagggtgtattacgcgaccatttccaactggtgttagaattacaattggttttaaagaacaaaatgataaaatgttagaagttttatcaaactttaaatacgaatagtaagtggggagtgggacagaaatgatattttcgcaaaatttatttcgtcgtcccaccccaacttgcattgtctgtagaaattgggaatccaatttctctttgttggggccccgccggcaaggttgactagaattgaaaaaagcttgttacaagcgcattttcgttcagtcaactactgccaatataactttgtagagcattgaacattgatttatgtctcaagctcaatgcagtgtgaatgatgaggtgagagtattcagtgtaaaaagcaacaatagatgatattgttttgtatcaattgcttttttgctatactgaatcaatactgatattttgaggagaagattaaaatgacccgtaaatcaatcgcgattgatatggatgaagtattggcagatacattaggagaaatcattgatgctgtcaattttagagcggatttaggtattaaaatggaagctttgaatggtcaaaaacttaaacatgttattcctgaacatgatggattaattacagaagtattgagagaaccaggcttcttcagacatcttaaagtgatgccgtatgcacaagaagttgtgaaaaaattaactgaacattatgatgtatatattgctacagcagcaatggatgtaccaacatcatttagtgataaatatgaatggttactagagttctttccatttttagatcctcagcattttgttttttgtggtagaaaaaacatcgttaaagctgattatttaatagatgacaatcctagacagcttgaaatttttactggtacaccgattatgtttacagcagtgcataatattaatgatgatcgatttgaacgcgtaaatagctggaaagatgtagaacagtattttttagataatattgagaaataaaatatatcacttgaaaaatttcatgtagaaaagatgatggataggctataaagtaattgtgactgagatgaacttttatgtcttagacactacaacactatattggcagtagttgactgcggggccccaacatagagaaattggattcccaatttctacagacaatgcaagttggcggggccccaacatagagaaattggaacgccaatttctacagacaatgcaagttggggtgggccccaacataaagaaatactttttctttagaaattagtatttcttatgcatgagtgtaactcatgcattcatatttttaagtacacattagctgtgactaatgataaagaatcgctacataatcaatcattagtcgttctttatcatttccgtcccgctctcaataaatgttagtctatcttattattataaatcggatgaatgtgttaatctatggcagattacacgtcatccgattttttatagaatttgaaaaagacgcataaaccactatgatttaaaatacaacatcaatcattttagtggcatgcgccaaaattatatgtctgtttttgaaacagggtaatagcttaaagctaataaaaacgaatataaggtgcgttgaatcttatgattacactccaaacctaatataatatcgggttaagatcattccggatgcttacaaatcattgacagtaagtaactgaatggcatttggtataacctcaatatcaataggtgtttctaatgaaatttcgccatcaatatcaactttcattgctggatctgttgtaagtgaaatctttttaccaggtatatgctcaataccttgagtaatttcattccaattcatgctatcacgctttttaaaaatatcatttaaaatactgaaactttgttcattaaaaatgaaagtgttcagttcaccatcttgaggagacaaatcagtcaatggtatacgactaccaccaatgaatggaccatttgctgttagtatcatggtcgtttcgccagaatatgtcttatcatctattgataattgataattaaattgtgttggatttagcagtgttttgacagttgatccaatataactcaatttaccaaatatatcttttgaaccatcttgtacgttttcagcgttttgaacaatgagacctaagccaacaaagttgagtgcatattgattatttattttaattacatcgtatgtaccaacttgtgcagaaatcatttgttcactagcttgtttatgattaggtgctatatttagcgtttttgtaaaatcattaaaagtaccgcctggtaaaatgccaatagggagttgaaggtcatgtgtcataacaccgtttataagttcgttaaccgtgccatcaccgccaagaataaataatatatctacatcttttgcatagtttttagttttgatttcttggcaatatttaataatgtcaccttcgttttcactcaattgaatagaaagatgcttacaaattgaacttaatgctgttgtaacttccccaataccttgattaatattttttaatccactgtgttcatggtaaaagaggacaccatgtgtatatttattttccatagtttagcctactttctaaaaattggttcattaaatatatatacccacttttaattgttaataccaaaaatatgtttttaaatagagaaaatggtaataaatgaaattgatttctatagagtgggacgagaaaatatagttatagctgtctataatgagcatattaagtttttatttatactgatatcttgaatttaattaatagaaacctataaaaaaacagtaagccatttaaatgacttactgttttttgaattaggccaacaatattaacgtatacctttcatcgctttgatgattaaaggtgagaatgctaatacaattgttgtaacaataattgcaacaacacctaggaaaataaagtaatttgtttgacctagtggttctattaacttaactaaagtaccattgattgcttgtgcagaagcgttagttaagtaccaaatactcatcatttgggcattaaatgctttaggtgctaacttaacagcagcactattacccgttggtgataagcatagctcaccgataacacaaataatgtacgataaaataacccagttaactgaaaagtttgatgaacctgatgcataacctacaataccaattagtatgtatgacgcacctgctaagaacgtaccaattgcaaattttactggcaggctaggttgtttagttccaagcttttgccataaaagtgaaataattggagctagtaataaaataaataatgggttaattgattggaagatcgcttcaccaaagtttgttttccaaccaaataagtttaatttcatatctgaatgttcaattccatatatgtttaatacattagacccttgttcttgaatagcccagaacaccattccaagaataaataatggaataaatgctttaacacgagaacgttcagtatcagtgacatctttacttctaataattaaagtgaagtaaatgattggtaatgcaatacctaatactaaaacagtattactaactaagttaaatgataatgagttagttaatgcaccaataacgataattaatacaattgctaaaacaacacttccgataataagaccatactttttcttttcagctggtgtcaatgggttagtaggtttcataccaacgctacctaagtttttgcggttgaaaagtacataccatactaaacctaatgccataccaactgctgcaatcaagaatccgccgtggaagtttttaacattaacaaagtgttgcaaaataataggtgataataatgcacccatattaactgacatatagaaaataacaaaacctgcatccatacgtctatcattttcaggatataaacggccaacgatatttgaaatgtttggcttcattaaacctgaaccaataatgatgaagaacattgatgtgaataagccgattaatgcaaatggtaagcttaaacaaatatgtccgataataataaagactgcacctaataaagtagcgcctctagtgcctgtaattctgtcagcaatccatccgcctggtattgatgtcatatagattaatgaaccataaactgacataattgacatagctgttgttttatcaattccaaggccattatctgttacggcaaagtacatgtagaaaatgagtagggcacgcatgccataataactaaacctttcccagaactctacaaagaagagtacgcctagtcctcgaggatgcccgaaaaatcctgtttgaggtatgtcttgaatttgatttccatgggagttttgttgtgtcatgtatacatcccatcctttcttcccctaatacaatagtttaagtaaatttgattgtgccttatcaactaaatattccaacaaatcacaaaaaaataaaaatattgagaatattctgttattaatcgcgcacaattaattagagataatataaaaatatacttattgacgttaaagtgcaataggtttctataaaaatgttgtttaattcgtgtactaatattcttttggtgtactttggtataaaatgttattttaatgtaacctattatgtatgctaaatgaaaaacacaccaataagttaggaaaatcaacttattggtgtgtttattaaatgatacatttaacgattatctattttttcgggatataaatcatgattcatcaaacgatgctcagccattttttcatatttagaatttggacgtccatagtttgtataaggatcaatagaaattccaccacgtggtgtgaacttgccccagacttcaatataatgtgggtccataagctctatcaaatcattcataataatattcatacaatcttcgtgaaaatcaccgtgatttctgaaactaaataagtataatttcaaagattttgattcaaccattttaacatttggaatatatgaaatatagatagttgcaaaatctggttgcccagtaattggacataatgatgtaaattctggacagttgaattttacgaaatagtcacgaccttgatgcttattatcaaacgattctaatacatcaggacgatagtcaaaattgtaagtattgtcttgatttcctaataaagttatatcttgtaattcatcttgttgacggccatgtgccatataaagcgctcctttaaatttatttttttattattttggcgtctcggcgtgctttttcaaacatgtaataacttgcaccgataataacgacgtaacctaatgttgcatagaaatctggagattctccgaatagaataaatccaagtattgctgtgaaaattatagatgcatacgtaaaaatagaaatatcttttgctgctgcaaaactatatgctaaagtaacaccaatttgacccacagcggcagctaagccagcccctaatagataaagtatttgcatctgactcattggttcataagtatatgcagtgaaaggtattaaaacgatgacagaaaataaggagaagtaaaatactatagtatatggtgcttctcttgtactaagtgctcgaacacatgtatatgctgatgctgcaaaaatacctgagaataagccagctaatgatggaatcatagatgatgaaaattcaggtttcactattaaaagcatacctaaaatagcaattatcattgctgtaatttgatacttccttaccttttcatgtaagaaaacaatgcttaataaaatcgtccagaaaggattgagtttcattaatgaatcggcatcactaagtaccatatgatcaatggcataaatatttaacaatacaccaataagtccaagtgttgatcgtgttattaataagggttgacttgaaagtctgccaaacattggctgatggtatttatatataaaaaataatggaataaacattgctactaagtttcgtgctaatgatttttgaaaaacaggaaggtcacctgcaagtctgaaaaacactgacataaaactgaaaccaatagccgaaattaaaatggcaatgataccttttactttaggattcaattttatcgcctcttttatataaaattaacgtatttatattagcataaaacaacatgttgtgcataaatagttgaaatttactataaaaagactataatagactgtagcgaacaaacgttctgtgtttatttgtcggaataatagggcattacacttttatgaatgtttgtgttattacataaaacaaatatcaattcagtatcaagctaataagctttttcttgatttctgttgatacaattgagattgacacagatttaaaaaaatcaagtgatatctactaaaaaatttttttaaatttgttcaagtttttctaatttagtattggtgcctagttggaacgttttacgaacattcgattagaaaatggcactttaaatcatagtgtgtcttatgtataatgaaacacataatatagtgttggtgaaacgaaaaagacacaatatcttgtgttttgtatgcaaatgctttatttatgaagaaattacatttaaaagtaatttaacacagaaatttaatagttattatcaattaatagtcatatttttagaaaatgtactgagcaaatggaagatatccaatgatgtaaacactacatatagtgatttttatacattcaacccatataagctactattttctcaaatataaatctatgcaattggtttacatttgagaaaataagtagcttcattatagttaatacaatgctgagataaccatagtaaccatgttgttaaagcattttttaattggaatgactactttatttaaaagggttgaagaaagaaggtgatccaatgaaaataatatatttttcatttactggaaatgtccgtcgttttattaagagaacagaacttgaaaatacgcttgagattacagcagaaaattgtatggaaccagttcatgaaccgtttattatcgttactggcactattggatttggagaagtaccagaacccgttcaatcttttttagaagttaatcatcaatacatcagaggtgtggcagctagcggtaatcgaaattggggactaaatttcgcaaaagcgggtcgcacgatatcagaagagtataatgtccctttattaatgaagtttgagttacatggaaaaaacaaagacgttattgaatttaagaacaaggtgggtaattttaatgaaaaccatggaagagaaaaagtacaatcatattgaattaaataatgaggtcactaaacgaagagaagatggattctttagtttagaaaaagaccaagaagctttagtagcttatttagaagaagtaaaagacaaaacaatcttcttcgacactgaaatcgagcgtttacgttatttagtagacaacgatttttatttcaatgtgtttgatatttatagtgaagcggatctaattgaaatcactgattatgcaaaatcaatcccgtttaattttgcaagttatatgtcagctagtaaatttttcaaagattacgctttgaaaacaaatgataaaagtcaatacttagaagactataatcaacacgttgccattgttgctttatacctagcaaatggtaataaagcacaagctaaacaatttatttctgctatggttgaacaaagatatcaaccagcgacaccaacatttttaaacgcaggccgtgcgcgtcgtggtgagctagtgtcatgtttcttattagaagtggatgacagcttaaattcaattaactttattgattcaactgcaaaacaattaagtaaaattgggggcggcgttgcaattaacttatctaaattgcgtgcacgtggtgaagcaattaaaggaattaaaggcgtagcgaaaggcgttttacctattgctaagtcacttgaaggtggctttagctatgcagatcaacttggtcaacgccctggtgctggtgctgtgtacttaaatatcttccattatgatgtagaagaatttttagatactaaaaaagtaaatgcggatgaagatttacgtttatctacaatatcaactggtttaattgttccatctaaattcttcgatttagctaaagaaggtaaggacttttatatgtttgcacctcatacagttaaagaagaatatggtgtgacattagacgatatcgatttagaaaaatattatgatgacatggttgcaaacccaaatgttgagaaaaagaaaaagaatgcgcgtgaaatgttgaatttaattgcgcaaacacaattacaatcaggttatccatatttaatgtttaaagataatgctaacagagtgcatccgaattcaaacattggacaaattaaaatgagtaacttatgtacggaaattttccaactacaagaaacttcaattattaatgactatggtattgaagacgaaattaaacgtgatatttcttgtaacttgggctcattaaatattgttaatgtaatggaaagcggaaaattcagagattcagttcactctggtatggacgcattaactgttgtgagtgatgtagcaaatattcaaaatgcaccaggagttagaaaagctaacagtgaattacattcagttggtcttggtgtgatgaatttacacggttacctagcaaaaaataaaattggttatgagtcagaagaagcaaaagattttgcaaatatcttctttatgatgatgaatttctactcaatcgaacgttcaatggaaatcgctaaagagcgtggtatcaaatatcaagactttgaaaagtctgattatgctaatggcaaatatttcgagttctatacaactcaagaatttgaacctcaattcgaaaaagtacgtgaattattcgatggtatggctattcctacttctgaggattggaagaaactacaacaagatgttgaacaatatggtttatatcatgcatatagattagcaattgctccaacacaaagtatttcttatgttcaaaatgcaacaagttctgtaatgccaatcgttgaccaaattgaacgtcgtacttatggtaatgcggaaacattttaccctatgccattcttatcaccacaaacaatgtggtactacaaatcagcattcaatactgatcagatgaaattaatcgatttaattgcgacaattcaaacgcatattgaccaaggtatctcaacgatcctttatgttaattctgaaatttctacacgtgagttagcaagattatatgtatatgcgcactataaaggattaaaatcactttactatactagaaataaattattaagtgtagaagaatgtacaagttgttctatctaacaattaaatgttgaaaatgacaaacagctaatcatctggtctgaattagcagatgattagactgctatgtctgtatttgtcaattattgagtaacattacaggaggaaattatattcatgatagctgttaattggaacacacaagaagatatgacgaatatgttttggagacaaaatatatctcaaatgtgggttgaaacagaatttaaagtatcaaaagacattgcaagttggaagactttatctgaagctgaacaagacacatttaaaaaagcattagctggtttaacaggcttagatacacatcaagcagatgatggcatgcctttagttatgctacatacgactgacttaaggaaaaaagcagtttattcatttatggcgatgatggagcaaatacacgcgaaaagctattcacatattttcacaacactattaccatctagtgaaacaaactacctattagatgaatgggttttagaggaaccccatttaaaatataaatctgataaaattgttgctaattatcacaaactttggggtaaagaagcttcgatatacgaccaatatatggccagagttacgagtgtatttttagaaacattcttattcttctcaggtttctattatccactatatcttgctggtcaagggaaaatgacgacatcaggtgaaatcattcgtaaaattcttttagatgaatctattcatggtgtatttaccggtttagatgcacagcatttacgaaatgaactatctgaaagtgagaaacaaaaagcagatcaagaaatgtataaattgctaaatgacttgtatttaaatgaagagtcatacacaaaaatgttatacgatgatcttggaatcactgaagatgtgctaaactatgttaaatataatggaaacaaagcactttcaaacttaggctttgaaccttattttgaggaacgtgaatttaacccaatcattgagaatgccttagatacaacaactaaaaaccatgacttcttctcagtaaaaggtgatggttatgtattagcattaaacgtagaagcattacaagatgatgactttgtatttgacaacaaataacaattaaattaaaagaccttcacatgtaaagggaaatagcgattcgtttcgtcttgtctcctacatgttgaaggtctttttttatgtgtatctaactcattatgagtctgagtaagaaatcaatgctctaagatgtacaatgctatttatattggcagtagttggcggggccccaacacagaagcaggcggaaagtcagctaacaatattgtgcaagttggcggggccccaacatagaagcaggcggaaagtcagctaacaatattgtgcaagttggcggggccccaacataaaagcaggcggaaagtcagctaacaatattgtgcaagttcgggcggggccccaacataaagaaaaactttttcctttagaaattatcacttccacatgagttttactcatgtattcctatttttaagtacacattagctgaggctaatgttaagaaccactacttaatcaatcattagtagtttttatcatttccactattcccagacatcaaaatcttaagtgttctattttactttaagtaaacaaaatacacattccgaaaaattaaatttcagtttaattgcaaatatcaataaaattgacactaaattatttgaaaggctattgaaattatggtcaaaaaacgctactattaatgagaaatattatcaatgataatgattatcattaatttaaagggagaaaaatttgtaatgaagtatttattaaagggaaatattttgcttctattactaatattgttgacaattatttcgttgttcataggtgtgagtgaactatcaattaaagatttactacatttaactgagtcacagcggaatattttattctcaagccgaataccaaggacgatgagtattttaattgctggaagttcgttggctttagcaggcttgataatgcaacaaatgatgcaaaataagtttgttagtccgactacagctggaacgatggaatgggctaaactaggtattttaattgctttattgttctttccaaccggtcatattttattaaaactagtatttgctgttatttgcagtatttgcggtacgtttttatttgttaaaatcattgattttataaaagtgaaagatgtcatttttgtaccgcttttaggaattatgatgggtgggattgttgcaagtttcacaaccttcatctcattgcgcacgaatgctgttcaaagcattggtaactggcttaacgggaactttgccattatcacaagtggacgctatgaaattttatatttaagtattcctcttttagcattgacatatctttttgctaatcatttcacgattgtaggaatgggtaaagactttactaataatttaggtttgagttacgaaaaattaattaacatcgcattgtttattactgcaactattacagcattggtagtggtgactgttggaacattaccgttcttaggactagtaataccaaatattatttcaatttatcgaggtgatcatttgaaaaatgctatccctcatacgatgatgttaggtgccatctttgtattattttctgatatagttggcagaattgttgtttatccatatgaaataaatattggtttaacaataggtgtatttggaacaatcattttccttatcttgcttatgaaaggtaggaaaaattatgcgcaacaataataaaaaaataatgcttttaattgcagtaacgttattaattagtatgctgtacttatttgtaggtattgattttgaaatatttgaatatcaattttcaagtcgtttaagaaagttcatattaattattttagtaggtgctgccattgcaacttcagtggtgatttttcaagcgattacaaataaccgtctattgacaccatcaataatggggttagatgcagtttatttatttatcaaagtattgccagtctttttatttggaattcaatcggtatgggttactaatgtatatttgaactttatattaacacttataacgatggtgttattcgcactaatcctattccaaggtatctttaaaatcggacatttttcaatttattttatcttacttattggtgtccttttaggaacattttttagaagcataacaggttttattcaactgattatggatcctgagtcatttttagcaatacaaagtagtatgtttgctaattttaatgcttctaattcgaatttagttactttctcagcagtgctattagtaatcttattagtcattacaattttactattgccttatttagatgtattgcttttaggtcgtgctgaagcaattaatcttgggatatcgtatgaaaaattaacgcgaattctacttgtaatagtctcagttttagtttctgtgtcaactgcattagtaggaccaattacatttttaggtttattaactgtaaatctagcgcatgaactaatgaagacgtatgaacataagtatattttaattgcgacaatttgcttgagttggattagtttatttagtgcgcaatgggtagttgaaaatgtgtttgaagctacgacagaaatgagtatacttattgatttgattggtggaagttatttcatttatctattagttagaaggagaaatgcgcaatgattcaagttgaaaatttaactaaaactataaataatcaaatgatattggaagatattagcatagatatcgaaaaaggtaaattgacttctttaattggacctaatggtgcgggtaagagtactttactttcagcgatatgtaggttaattcgttttgagaacggtgaagtgaaaatagatggacagctcatgtctgattataaaaataatgacttgtcgaaaaaaatatctatattaaaacaaacaaaccatactgaaatgaatattacggtagagcagttggtaaactttggacgattcccttattctaaaggtcgtttgacgaaagaggatcatgatattgtcaatgatgcgctagatttgttgcaactacaagatatcagaaatcgtaatattaagtcattatctggtggacaacgtcagcgtgcatacattgcaatgacaatagcacaagatactgaatatattttgctagatgaaccattaaataatttagatatgaagcatgctgttcaaattatgcaaacgttaaaaatgttagcgcataaaatgaataaagcgattgtcattgtgttacatgatattaactttgcgtcctgttattcagatcagattgtagcattgaaaaacggacaactagttaagtcagatttgaaagataatgtcattcaaagtagtgttttaagtgatttatatgacatgaatattcaaattgaacatataagaaatcaaaggatttgtttatattttaaggattgataatttggagacactttaaaggggtgatgcgccaattaaagaagggttaaacgtaaagcatttatttatatttcacatcaagcacacagattaagccaaaagaggagaatattatattatgaagaaaacagtcttatatttagtattagcagtaatgtttttattagcggcatgcggtaacaattctgataaagaacaatcaaaatcagaaactaaaggttctaaagatacagtaaaaattgaaaataactataaaatgcgtggcgagaaaaaagatggtagtgacgctaaaaaagttaaagaaactgttgaagtaccaaaaaatcctaaaaatgcagttgtgttagactatggcgcattagatgtaatgaaagaaatgggcttatcagataaagtaaaagcattacctaaaggggaaggcggtaagtcattaccgaatttcttagaatcatttaaagatgataaatatacaaacgttggtaatttaaaagaagtgaattttgataaaattgctgcgatgaaacccgaagtaatctttatctctggacgtacagctaatcaaaagaatttagatgaattcaaaaaagctgcacctaaagcgaaaattgtttatgttggtgcagatgaaaagaacttaattggttcaatgaaacaaaacactgaaaatatcggaaaaatttacgataaagaagataaagctaaagaattaaataaagatttagataacaaaattgcttcaatgaaagataaaacgaaaaacttcaataaaactgttatgtatttactagttaacgaaggtgaattatcaacatttggacctaaaggtcgttttggtggattagtttacgatacattaggattcaatgcagttgataaaaaagtaagtaatagcaatcatggacaaaatgtttctaacgaatatgttaataaagaaaatccagatgttattttagcgatggatagaggtcaagcgataagtggtaaatcaactgcgaaacaagcattaaataatcctgtattaaaaaatgttaaagcaattaaagaagacaaagtatataatttagatcctaaattatggtactttgcagctggatcaactacaactacaattaaacaaattgaggaacttgataaagttgtaaaataattttaaaagaggggaacaatggttaaaggtcttaatcattgctcccctcttttctttaaaaaaggaaatctgggacgtcaatcaatgtcctagactctaaaatgttctgttgtcagtcgttggttgaatgaacatgtacttgtaacaagttcatttcaatactagtgggctccaaacatagagaaatttgattttcaatttctactgacaatgcaagttggcggggcccaaacatagagaatttcaaaaaggaattctacagaagtggtgctttatcatgtctgacccactccctataatgttttgactatgttgtttaaatttcaaaataaatatgatagtgatatttacagcgattgttaaaccgagattggcaatttggacaacgctctaccatcatatattcattgattgttaattcgtgtttgcatacaccgcataagattgctttttcgttaaatgaaggctcagaccaacgcttaatggcgtgcttttcaaactcattatggcacttatagcatggatagtatttattacaacatttaaatttaatagcaataatatcttcttcggtaaaataatggcgacagcgtgtttcagtatcgattaatgaaccataaactttaggcatagacaaagctccttaacttacgattcctttggatgttcaccaataatgcgaacttcacgatttaattcaatgccaaatttttctttgacggtcttttgtacataatgaataaggttttcataatctgtagcagttccattgtctacatttaccataaaaccagcgtgtttggttgaaacttcaacgccgccaatacggtgaccttgcaaattagaatcttgtatcaatttacctgcaaaatgaccaggcggtctttggaatacactaccacatgaaggatactctaaaggttgtttagattctctacgttctgttaaatcatccattttagcttgtatttcagtcattttaccaggagctaaagtaaatgcagcttctaatacaactaagtgttctttttgaataatgctattacgataatctaactctaattcttttgttgtaagtttaattaacgagccttgttcgtttacgcaaagcgcatagtctatacaatctttaacttcgccaccataagcgccagcattcatatacactgcaccaccaattgaacctggaataccacatgcaaattcaaggccagtaagtgcgtaatcacgagcaacacgtgagacatcaataattgcagcgccgctaccggctattatcgcatcatcagatacttcgatatgatctagtgataataaactaattacaataccgcgaataccaccttcacggataataatatttgagccatttcctaaatatgtaacaggaatctcattttgataggcatatttaacaactgcttgtacttcttcatttttagtaggggtaatgtaaaagtcggcattaccacctgttttagtataagtgtatcgttttaaaggttcatcaactttaattttttcatttgggataagttgttgtaaagcttgatagatgtctttatttatcacttctcagtacatcctttctcatgtctttaatatcatatagtattataccaattttaaaattcatttgcgaaaattgaaaagaaagtattagaattagtataattataaaatacggcattattgtcgttataagtattttttacatagtttttcaaagtattgttgcttttgcatctcatattgtctaattgttaagctatgttgcaatatttggtgtttttttgtattgaattgcaaagcaatatcatcattagttgataagaggtaatcaagtgcaagataagattcaaatgtttgggtattcatttgaatgatatgtagacgcacctgttgttttagttcatgaaaattgttaaacttcgccatcataactttcttagtatatttatgatgcaaacgataaaaccctacataatttaagcgtttttcatctaaggatgtaatatcatgcaaattttctacacctactaaaatatctaaaattggctctgttgaatatttaaaatgatgcgtaccgccaatatgttttgtatattttactgggctgtctaagaggttgaataataatgattcaatttcagtgtattgtgattgaaaacaattagttaaatcactattaatgaatggttgaacatttgaatacatgataaactcctttgatattgaaaattaatttaatcacgataaagtctggaatactataacataattcattttcataataaacatgtttttgtataatgaatctgttaaggagtgcaatcatgaaaaaaattgttattatcgctgttttagcgattttatttgtagtaataagtgcttgtggtaataaagaaaaagaggcacaacatcaatttactaagcaatttaaagatgttgagcaaaaacaaaaagaattacaacatgtcatggataatatacatttgaaagaaattgatcatctaagtaaaactgatacaactgataaaaatagtaaagaatttaaggcactacaagaagatgttaaaaaccatctcatacctaaatttgaagcatattataagtcagcaaaaaatttgcctgatgatacaatgaaagttaagaaattaaaaaaagaatatatgacgcttgcaaatgagaagaaggatgcgatatatcaattaaaaaaattcataggtttatgtaatcaatctatcaagtataacgaagacattttagattatacgaaacaatttgaaaaaaatagatacaaagttgaatcagaaattaaattagctgataataaaagtgaagcaactaatcttacgacaaaattagaacataataataaagcgttaagagatactgcgaagaagaacctagatgatagtaaagaaaatgaagtaaaaggcgcgattaaaaatcacattatgccaatgattgaaaagcaaattaccgatattaaccaaactaatattagtgataagcatgttaataatgcaaggaaaaacgcaatagaaatgtattacagtctgcagaactattataatacacgtattgaaacaataaaggttagtgagaagttatcaaaagtcgatgtagataagttgccgaaaaagggtatagatataactcacggcgataaagcctttgaaaaaaagcttgaaaaattagaagaaaaataactataatcatttttcaaagttaaaaattttgaatttatggttaacatgtcaacttactatgtgtataatggtaaacattgatattaactatatgtataaaaatgtcacgcagatgctatttaaatgtgataaatatttttagaggtgaatagagtggctataaagctaagttcaattgaccaatttgaacaggttattgaggaaaataaatatgtttttgtattaaaacatagtgaaacttgtccaatatcggcaaatgcgtacgatcaatttaataaatttttatatgaacgcgatatggacggttattatttgattgtccaacaagaacgcgatttgtcagattatattgctaaaaaaacgaacgttaaacatgaatcacctcaagcattttattttgtaaatggtgaaatggtttggaatcgagaccacggtgatatcaatgtgtcgtcattagcacaagcagaagaataatgaaactatagggttggaacattttgccttacactactagacgtgaatagcacaacttaaattcgtgtgaatcagagtagtttggctataatgatgttctgaccttttattttatgtcacctttagaagcagttaagttagtacttttttacaaacatatgtataatatattcgagtatttttattgaaaatattttggaaaacgacgaatccaataagaaaatttaaacatgatttgtaagttagtttaataggaaatatatgctaaaccaaaagaagcatattgttatttactggaataattaataatcatgtcatgttaaatgttcgcatataatcacgagataaaatctaaaatttaagattaatcttttatgaataaaaaacgtatcacaacaaataataaagtaaggtggtcaaggttatgaaagtattagtagccatggatgagtttcatggaattatttcaagttatcaagctaatagatatgttgaagaggcagttgcaagccaaattgaaactgcagatgtagttcaagtaccattgtttaatggaagacatgaattattagattctgtatttttatggcaatctgggcaaaagtatcgtataccagtacatgatgcagatatgaatgaagttgaaggtgtttacggacaaactgatacagggatgaccgttatcgaggggaatttatttttaaaaggtaaaaaaccaattgttgaacgaacaagttatggtttaggagaaatgattaaacatgcattagataacgacgcaaaacatgttgtaatttcactaggtgggattgatagttttgatgctggtgcaggtatgttacaagcattaggtgctcaattctatgatgacgaagggcgtgtcgtagatatgagacaaggtgctggtgtaattaaatatattcgtcgtatggatatgtcgaacttacaccctaaaatggaaacagcaagaattcaagtaatgtcggatttttcaagtcgattatatggtaagcaaagtgaaatcatgcaaacttatgatgcgcatcagttgaatcataatcaagcagcagaaatcgataatttaatttggtattttagtgagttatttaaaagtgaattgaaaattgcaattggtccagttgaacgtggtggtgctggtggtggaattgcagcagtcttgaatggactgtatcaagctgaaatattaaccagtcatgcattagtagaccaactaacacatttagaaaatttagttgaacaagcggatttaattatttttggagaaggattaaatgaaaatgatcagttgctagaaacgacaacattgcgtattgcagaactttgtcataaacatcaaaaggttgccattgcaatttgtgcaactgctgaaaagtttgatttatttgaatcacaaggggttacagcaatgtttaatacatttatcgatatgccagaaacttatactgactttaaaatggggttacaaattaggcattatacggttcagtctttaaaactgttgaaaacacattttaatgttgaggtttagtaaagaaggactaaattggtgatgctgtcatgatggttaataacatttatgatggttagcaaaacgaattagaagatcgaaagtatacgtaaaaaatatgaaaaatcacgctatcattgcactgaatgttagcgtgatttttatatattaattaagcctgagttgaactagtatataatcgttggtttttagtgattttcagcgatatcttctacaattccaatgattacttgtactgctttttccataacatcaatggatgcatattcatatgggccgtggaagttaccgcaacctgtaaagatgtttggagttggtaaccccataaatgacaattgtgaaccatctgtaccaccgcgaataggttcagtgtttgctggaatatctaatttggcaaagacacgtttaggtatatcaataatatgaggcaatggtaatattttttctgccatattgaaatattgatccgatatatcaactttaactggataattttcaaaatgggcattgatatcgtcacgtatttctaaaatacgtttcttacgcaattcgaattgttttttatcatgatcacgaataatgtattgcaaagttgctttttcaacagttccttcaaagttcattaagtgataaaagccttcgtatccttctgttcgctccggaacttcactatcaggtagcaaactatcgaattgttcacctaaacgtattgcgtttaccattgcatttttagctgaaccaggatgaacatttacaccgtggcatgtaataaccgcttcagcagcgttaaagctttcatattgtaattctccatattgactaccatccatagtataagcaaaatcagcattgaagcggtcaacatcaaatttatgtggaccacgaccgatttcttcgtctggtgtaaatccaatgcgaatggtaccatgtttaatttctggatgttcttgtaaataacaaatagcttccataatttccacaatacccgctttatcgtctgcacctagtaacgatgtaccatcagttaccattaatgtatgaccaactaaactgttaagttctggaaatactttaggatctaagacacgtttagtattgcctagtttgtatggcttaccatcatagttttcaataatttgcggtttaacatttgaagcattgaaatcaggtgatgtatcaacatgcgccaaaaatccaactgttgggacgtcgacatcgatgttactttctaatgtagcaaataagtagccattttcatctaaatcagttggcaatcctaattgttgtaattctttttctaataaatgtaacaaatcccattgcttttcagttgaaggtgttgttgtagattttggatcagattgcgtatcaattgtcgtatatcttgttaatctatctatcaattggttcttcattatattcgaccccttaaactctattattcatgttgtaagattttttatatgtcttacctttgattttaccatacagttgtttgatacgtgtgtataggtaatatagaatttcagaaactaatataccgaaagcaatcgcacctgaaatcagtgtaacttctaaaaatgtatttacagcacttgtataatcatttgatactaaaaaacgagtcgcttgataagctgcaccaccaggtactaatggtataatgcctggcactatgaatataattaccggtcgtttatatctgcgactcatagtatgactcattaagcctaaaattaagcttcccaaaaatgaagcgccaacttttccaaactctaaatctaccgttaattggtaaatcgtccatgcaatggcacccacaaatccacatgctactaagaggcgtttgggtgcattgaaaatgatagagaaaagtactgttgatataaagctgattgtaaaatgaaataaataaaatagcatgctttaacagtccttccttaaatgattaataaaacgattgcgacaccagcaccgattgcgaatgctgttaatgcagcttcaacaccgcgagacatacctgcaagtaattcacccgctaataaatctcgaatggcattggtaattaatataccagggacaagtggcatgacactggctatagtaatgatatcttgattggttgcaatgcctaatttagtaaatgtggctgcaatggatatgaccacagcggctgcaacaaactctgagaaaaatttaatttgtatatagcgttgcacaaagctgaatgttaaaaatgcggatccgccagcaatgactgcaatccaacaatctgatgcgacaccaccaaacataaataggaagaagccacatgcaatggcagctgcaaagaaattcgttaaaaaagaatattgtaatgatgcatgctgtaaatgaataaattcagatttagcttcatcaattgtgagttctttatttgatattttacgtgaaagactattcgttaaagcgattttctctaaatctgttgtacgctcttgtacacgaattaatcttgtacttgttcgatcgtttaatgaaaaaataattgcagttgaactgacaaaactatatgtattatgaagaccataactatgtgcgatacggttcattgtatcttcaactcgatatgtttcagcacctgattcaagtaaaattctacctgcaattaatacaacatcaatcactttgttttcatctataattgtgattgaatctggcatatcaattcacctccaatgatatgtgttatttatttgaacaattgaagtttacaacttgttgttacaactttcaatagtgagactttgtgttagtatgatgaacttgtatggttcaaatttaaatgagaaaaactgttaatctttgctattatactatgatttaataatagcaaaggattaacagttttgtcgttgttataaattgataatagggttaaacattactttgtttcgcccttgatttttggctacatgcaccatatcgtctgcatctttaaacactttacgctgtgattttggatcgtcatctgttaaataaccaacaccgatagacactgacaatttaataacttctttgtttggtaaatggaatgatgatttttcaacacccgaacgaatattttcagctaatttaacactttgatcaagtgaataattgtgaatgacaactgagaactcttcgccaccatttctaaaaattttaaattgattcggcacatagtttttaagtaattgagacatttgttttaatacagcatcacctgatttgtgtgagtaggtatcattgacatctttaaatccatcgatatcgattaataataatgcgatactttgatgttctttttcagcttttcgtgaaatttcatttaaatgtctatcaaattcttttacattacctaagcctgttaagtaatcatatttatcttcgttttcataacgatttacgagtgagaagaaatgccaaatatcgacaaatgttatcgctgaagctaaagtgataattaatgaaattggtattaaaatgataacttccgatagtgtgtaaataggactcactaacgcgacaccaaataaaatgattattgtaacaacattaagtattaataatgatagcacatcattttgttttaaaaatggtccaatagcacttgttactgcagcaataacaatcaacgtaacaccgtacataatcgagttgttaaatactacaatttcaacaattgctacaattactgtggcagataatgtatagaccatatttgtaaatctacctaaaaacaataaaggaacgaatgttaagtgaattaaataatcttcacgataagggatagggtagacagataataataatgatacgattgtcattaaaacagtgacataagccttagaaaaaaccatacgtttgttttctgaatactgtaagcgatggaataaatagattccagcgactataacagatatattgtatataaatgcttcgaacatgtctgaatcgactcctttaattgaccactagctattgtaagtgaaaacttacaatttgtcattagtttacatataaaattaatgtatgatatagactttgatgttaaaatgttgccttaaatgatatgatgaaaaaatgaataataggcgatatataagaaatgaatcgtatagttgtaaatatgatatcattgattgaacgaattaatttataataaagctataagatatacgtagaaaatagatatatcattctataaagacaatattaaataaatataacgttaaaaacaattaatatcgatgaaggtgaataaatggttacattattactagttgcagtaacaatgattgtcagtttgacgataacaccaattgttattgcaatatcgaaaagattaaatttagttgataaaccaaattttagaaaagtacacactaaacctatttcagttatgggtggtacagtgattctcttttcatttttaataggtatttggattggtcatcctattgaaacagaaatcaaaccacttattattggtgcgattattatgtacgtacttgggcttgtagatgatatctacgatttgaaaccgtatataaaattggctggtcaaattgccgctgccttagtagttgctttttatggtgtgactattgattttatttcgttgccaatgggtacaacgattcattttggatttcttagtattccaattactgtgatttggattgttgctattacaaatgcaattaacttaattgatggactcgatggtttggcgtcgggtgtttctgcaatcggactcattacaatagggttcattgcaattttacaagctaatattttcataacgatgatttgttgtgttttattaggctctttaattgggtttttattttacaatttccatcctgccaaaatatttttaggtgatagtggggctttaatgattggatttatcatcggattcctttctttactcggattcaaaaatattacaattattgcattgttcttcccaattgttatcttagcagttccattcattgatactttgttcgcaatgattcgacgtgtgaaaaaagggcagcatataatgcaagctgataaatcgcatttgcatcataaactattagctttaggctacacacatagacaaacagtattattaatctattcaatctctattttatttagtctttcgagcattattttgtatgtatcgccaccattaggtgttgtattaatgtttgtattaatcatatttagtattgaattaattgttgaatttacaggattaatagataacaactaccgaccaatattaaatttaattagtcgtaagtcatctcataaagaggaatagggaatgaaagcatagctgtatgggataatttgtattatatggctttactctttacaatttttttgtattaaatttcaaatataaaaagcactgccataaacgtgtacttcaattgtcgtttaataatacgcaattgatatttaccgtcttatgatagtgctttttatttttattcagttggtatatcgaaaggtaactgctttggagtttcttcagtcaaatcgaaatttcctgcagtcatttgatttaaaaagttaataaacgcttcatagtcacttttaacgacatcgatatagtagcttaccttatcagtgtaagtttggtttcttaacataaaatgagttgaagctaattcatattcaaatttaccagtttgatcataattcagtgttactatacatggtactgcttctcgtagttcgacacgcccgatatcataaatgacgtctctaacagcaccgctataggcgcgaattaaaccgccaccacctaatttaataccaccaaaatatcttgttactacgacacacgcattatgaacatcgagcttttttaatatgtctaacattgggacaccggcagttcctgtcggttcaccatcatcattcgctttttgaatattcatttcaggtccaatagtatatgcagaacaattatgagtggcatctttatgttctttttttattgcagcaataaatgctttagcttcatcttcattttgaacaggtttgatatgagcaatgaatcttgatttactaatcacattttcaataatgtgttcttttttaacagtaatgatattttgtgtcataataactccttaattcataagcttaagattatttaatcttcattatacactgaaaatgacatgactataaatcgtttgattgccattttctttttaactgaaatattgtatcattgctatgagtatattttaggaggacgactatgaaaattgctgtgatgaccgattctacaagttatctgtcgcaggacttaatcgataaatataatattcaaatagcgccattaagtgtgacttttgatgatgggaagaactttacagaaagtaatgaaatagcaattgaagaattttataataaaatggcatcgtctcaaacgattccaacaacaagccaaccagcaattggcgaatggattactaaatatgaaatgttaagagatcaaggttacacagatatcattgtcatttgcttatcaagtgggattagtggaagttatcaatctagttatcaagcaggggaaatggttgaaggtgttaatgtacatgcatttgatagtaagcttgcagcaatgattgaaggatgttatgtattacgtgctattgaaatggttgaagaaggatacgagccacagcaaattattgatgatttaactaatatgcgtgaacacacaggtgcatatttaattgttgatgacttaaagaatttacaaaaaagtggtcgaattactggtgctcaagcatgggttggaacattattgaaaatgaagccagttcttaagtttgaagatggcaagattataccagaagaaaaagttcgtactaaaaagcgtgccattcaaacattagaaaagaaagtattagatattgtaaaagactttgaagaagtaactttatttgtcataaatggagatcatttcgaagatggtcaagcgttatacaaaaagttacaagatgattgtccttcagcttatcaagtagcatactctgagtttggtccagttgttgcagcacatttaggttctggtggattaggtttaggctatgttggcagaaaaataagattaacataattataaaattttaataaaagagtctatattgtaattggaaattatctctcgtatacatggctttaaatgttcatcatttgaaagccaaaatgctaaagatataagaaaatcattataatattaggctcttttttacgttgaaatgaggttttaagcattaaacattacgggaaattaattcatcctcatacttcacttactaatgaaaaaattaaaaaagaagtaacaggtgtcatcaaacaaaattcaaactattattgtgttcaatgtgaaagtacaaatccaaagcatttttatcagtatgattcctcagtacattccaagaaaattgtatattgcagaaattgtatatcactgggtcgaatggataatgtaacaagatataaaataacagagagttcgcaaagttcatcacaagcatattatcatctctcatttgaattgtcggaacagcagtcttatgcctcagaacatattgttcgagccattagaaagagacaaacgattttgttatatgccgtaacaggtgcaggtaagacagaaatgatgtttcaaggcattcaatatgcaagaatacagggagataatatagctattgtgtcaccacgtgtagatgttgttgtagaaattagtaaacgtattaaagacgcatttcttaatgaagatatagacatactacaccagcaatcaagacaacaatttgaagggcattttgttgtatgcacagtgcatcaactttaccgattcaaacagcactttgatactatttttattgatgaagtcgatgcctttcctttatcaatggataaaaatttacaacaagcattgaagtcatcttctaaagttgaacatgcaacaatttatatgacagcaacaccaccgaaacaacttctgtcagagattccccacgaaaatataattaaattgccagctcgctttcataaaaaatcacttccagttcctaaatatcgttatttcaaacttaataataagaagattcagaaaatgttataccgaattttacaagatcaaattaataatcaacgttatacactggtgttttttaacaatatagaaacaatgattaaaacattttcggtttataagcagaaaattactaaattaacatacgtccatagcgaggatgtttttcgctttgaaaaagttgaacaattaaggaatggacatttcgatgtcatttttactacgacaatattagaacgtggatttacaatggcaaatttggatgttgttgttatcgatgcacatcaatatactcaagaggctttaatacaaattgctggacgtgttggacgaaaattagaatgtcctactggaaaagtattgttttttcatgaaggggtaagtatgaatatgattcaagctaaaaaagagattcaaaggatgaacaaattagcattaaaaagaggttggattgatgaataattgtttgagttgtggtgctaagttatatgaaaatataaccatttataatttgttcaagaaacctaatagattatgtgacagatgcaaagagaattgggacaatattaaacttgatattaaagcaaggcgatgttcaaggtgcttaaaacacttaaatcaagatgaagcgtattgtttagactgcaagtttctatcggcacactttaatttaatggaacaattatattgtcaatttcaatatgacggtttaatgaaagagatgatacatcagtataaatttttgaaagactattatttatgtgaattattggcacatttgattgaaataccacaaacatcttatgactatattgtgccaattccttcttcgccggcacatgatttatctagaacatttaacccggtagaagcagtactaaaagctaaagggattcgctttgataagattttaaagatgtcaaatagaccaaaacagtctcatttaactaagaaagagcgtctggcagatgaaaatccatttattattgatacggaattagatttaaatggtaaggaaatattactcgttgacgatatttatacaactggattaacaattcatcgtgcagggtgtaaattatatgctaaaaatatcagaaaattcaaagtgtttgcgtttgcacgatagcgtaaaaatgttaaaatataataaagagttaccaataaagaggtttaaggagagattactatgattagatttgaaattcatggagataacctcactatcacagatgctattcgcaactatattgaggaaaaaattggtaagttggaacgttattttaatgacgtaccaaatgcagtggcgcatgttaaagttaaaacttattcaaattcagctactaaaattgaagtaacaattccattgaaaaatgttacgttaagagctgaagagcgaaacgatgatttatacgcaggtattgatttaattaataataaacttgaaagacaagttcgaaaatataaaacacgtattaatcgtaagagccgtgatcgaggagatcaagaagtgtttgttgccgaattacaagaaatgcaagaaacacaagttgataatgacgcttacgatgataacgagatagaaattattcgttcaaaagaattcagcttaaaaccaatggattcagaagaagcggtattacaaatgaatctattaggtcatgacttctttgtattcacagacagagaaactgatggaacaagtatcgtttaccgccgtaaagacggtaaatatggcttgattcaaactagtgaacaataaattaagtttaaagcacttgtgtttttgcacaagtgcttttttatactccaaaagcaaattatgactatttcatagttcgataatgtaatttgttgaatgaaacatagtgactatgctaatgttaatggatgtatatatttgaatgttaagttaataatagtatgtcagtctattgtatagtccgagtcgaaaatcgtaaaatatttataatataatttattaggaagtataattgcgtattgagaatatatttattagtgataaacttgttgacaacagaatgtgaatgaagtatgtcataaatatatttatattgattctacaaatgagtaaataagtataattttctaactataaatgataagatatattgttgtaggccaaacagttttttagctaaaggagcgaacgaaatgggatttttatcaaaaattcttgatggcaataataaagaaattaaacagttaggtaaacttgctgataaagtaatcgctttagaagaaaaaacggcaattttaactgatgaagaaattcgtaataaaacgaaacaattccaaacagaattagctgacattgataatgtcaaaaagcaaaatgattatttagataaaattttaccagaagcatatgcacttgttagagaaggctctaaacgtgtattcaatatgacaccatataaagttcaaattatgggtggtattgcaattcataaaggtgatatcgctgagatgagaacaggtgaaggtaaaacattaacagcgacaatgccaacatacttaaatgcattagctggtagaggtgttcacgttattacagtcaatgaatacttatcaagtgttcaaagtgaagaaatggctgagttatataacttcttaggtttgactgtcggattaaacttaaacagtaagacgacagaagaaaaacgtgaagcatacgcacaagacattacttacagtactaataatgagctaggttttgattacttacgagataacatggtgaattattctgaagatagagtaatgcgtccattacattttgcaatcattgatgaggttgactcaattttaatcgacgaggcacgtacgccattaattatttctggtgaagctgaaaagtcaacgtcactttatacacaagcaaatgtttttgcgaaaatgttaaaacaggacgaagattataaatacgatgaaaaaacgaaagctgtacatttaacagaacaaggtgcggataaagctgaacgtatgttcaaagttgaaaacttatatgatgtacaaaatgttgatgttattagtcatatcaacacagctttacgtgcgcacgttacattacaacgtgacgtagactatatggttgttgatggcgaagtattaattgtcgatcaatttacaggacgtacaatgccaggccgtcgtttctcggaaggtttacaccaagctattgaagcgaaggaaggcgttcaaattcaaaatgaatctaaaactatggcgtctattacattccaaaactatttcagaatgtacaataaacttgcgggtatgacaggtacagctaaaactgaagaagaagaatttagaaatatttataacatgacagtaactcaaattccgacaaataaacctgtgcaacgtaacgataagtctgatttaatttacattagccaaaaaggtaaatttgatgcagtagtagaagatgttgttgaaaaacacaaggcagggcaaccagtgctattaggtactgttgcagttgagacttctgaatatatttcaaatttacttaaaaaacgtggtatccgtcatgatgtgttaaatgcgaaaaatcatgaacgtgaagctgaaattgttgcaggcgctggacaaaaaggtgccgttactattgccactaacatggctggtcgtggtacagatatcaaattaggtgaaggcgtagaggaattaggcggtttagcagtaataggtacagagcgacatgaatctcgtcgtattgatgaccagttacgtggtcgttctggacgtcaaggtgataaaggggatagtcgcttctatttatcattacaagatgaattaatgattcgttttggttctgaacgtttacagaaaatgatgagccgactaggtttagatgactctacaccaattgaatcaaaaatggtatcaagagctgtagaatcagcacaaaaacgtgtagaaggtaataacttcgacgcgcgtaaacgtatcttagaatacgatgaagtattacgtaaacaacgtgaaattatctataacgaaagaaatagtattattgatgaagaagacagctctcaagttgtagatgcaatgctacgttcaacgttacaacgtagtatcaattactatattaatacagcagatgacgagcctgaatatcaaccattcatcgactacattaatgacatcttcttacaagaaggtgacattacagaggatgatatcaaaggtaaagatgctgaagatattttcgaagtcgtttgggctaagattgaagcagcatatcaaagtcaaaaagatatcttagaagaacaaatgaatgagtttgagcgtatgattttacttcgttctattgatagccattggactgatcatatcgacacaatggatcaattacgtcaaggtattcacttacgttcttatgcacaacaaaatccattacgtgactatcaaaatgaaggtcatgaattatttgatatcatgatgcaaaatattgaagaagatacttgtaaattcattttaaaatctgtagtacaagttgaagataatattgaacgtgaaaaaacaacagagtttggtgaagcgaagcacgtttcagctgaagatggtaaagaaaaagtgaaaccgaaaccaatcgttaaaggcgatcaagttggtcgtaacgatgattgtccatgtggtagtggtaaaaaattcaaaaattgccatggaaaataaatgatataaaataactccttccaattaaacacctatagtttgtgttatgggaggagtctttttattttacaagcgttaaatactttaaaaaatgtgaagaagttgttaaacgttgttatgtacttagttttaaaaaatcggtttaggcatatgtcgatgataaatgtactgatttttaacaataaatgcataaactaattgtcagtgtgcttatatttcttaacattgttatttaacaaaattatgttaaaatttagcattataaaagatgcaaatcaatgacttgaattgaaatataaataggagcgaatgctatggaattatcagaaatcaaacgaaatatagataagtataatcaagatttaacacaaattagggggtctctttgacttagagaacaaagaaactaatattcaagaatatgaagaaatgatggcagaacctaatttttgggataaccaaacgaaagcgcaagatattatagataaaaataatgcgttaaaagcaatagttaatggttataaaacactacaagcagaagtagatgacatggatgctacttgggatttattacaagaagaatttgatgaagaaatgaaagaagacttagagcaagaggtcattaattttaaggctaaagtggatgaatacgaattgcaattattattagatgggcctcacgatgccaataacgcaattctagagttacatcctggtgcaggtggcacggagtctcaagattgggctaatatgctatttagaatgtatcaacgttattgtgagaagaaaggctttaaagttgaaactgttgattatctacctggggatgaagcggggattaaaagtgtaacattgctcatcaaagggcataatgcttatggttatttaaaagctgaaaaaggtgtacaccgactagtacgaatttctccatttgattcatcaggacgtcgtcatacatcatttgcatcatgcgacgttattccagattttaataatgatgaaatagagattgaaatcaatccggatgatattacagttgatacattcagagcttctggtgcaggtggtcagcatattaacaaaactgaatcggcaatacgaattacccaccacccctcaggtatagttgttaataaccaaaatgaacgttctcaaattaaaaaccgtgaagcagctatgaaaatgttaaagtctaaattatatcaattaaaattggaagagcaggcacgtgaaatggctgaaattcgtggcgaacaaaaagaaatcggctggggaagccaaattagatcatatgttttccatccatactcaatggtgaaagatcatcgtacgaacgaagaaacaggtaaggttgatgcagtgatggatggagacattggaccatttatcgaatcatatttaagacagacaatgtcgcacgattaatatatattttaaaaccgaggctctaaaagggcgtcggtttttggtttttttaaaggtagctaaataaattgtaaattagattttggaatatgatttgtttatgaatatttaagtacaattcggtagatagagttagaatatattttttaaaagttgtgtttgttaaaacaacatatgcagtgtgcatttagtaatattacctatggcgattttcaaggtattgaattaattattgaaaacgttctcaattacatggtatgaatacattttacactatgataaaaggttgtattctttttatattgttaaccatttgattacatcgttataacaatagcttttgacaaaatgtattgtgctatagtatttgcatacttaaaatactaacagcaaaggaatgacagcaagatgaaaaaatctcttacagtgacggtttcgtcagtgttagcttttttagctttaaataatgcagcacatgcacaacaacatggcacacaagtaaaaacacctgttcaacataattatgtatcaaatgttcaagcacaaacgcaatcaccgacaacttatacagtagttgctggcgattcattatataagattgctttagagcatcacttaacgttgaatcaattatattcatacaatcctggtgtaacacctttaatttttcctggtgacgtgatttcacttgtgcctcaaaataaagtgaaacaaactaaagcggttaaatcaccagtaagaaaagcaagccaagctaaaaaggtagtaaaacaacctgtacaacaagcatctaaaaaagtagtagttaagcaagcacctaagcaagcagtaactaagacagttaatgtagcatacaaacctgctcaagtacaaaaatcagtaccaactgtacctgttgcacataactacaataaatcagttgctaacagaggaaacttatatgcttatggaaactgcacatattatgctttcgatcgtcgtgcacaattaggtagaagtataggaagtttatggggcaatgcaaataactggaattacgcagcaaaagttgcaggatttaaagtagataaaacaccagaagttggcgctattttccaaacagctgctggtccatatggacatgttggtgttgttgaatctgtaaaccctaatggaacaattactgtttctgaaatgaactatgctggatttaatgttaaatcttcaagaacaattttaaatccaggaaaatataattacatccactaagtaatatatcaagacaagactatcctcttagcctgtttaagtaacaggttgagaggattttttggtatcatttaatcagagttatataaagaagatatttaaatgatatttaattgattgatatgtaaaaagaaagtataatttatgattaattaatggaggaggtaattgaaatgggtgtacatcaatattttaaaagattatcagatatggaaagacttataagattacctggaaaatttaaatattttgaacacaatgttgcagcacactcctttaaagtaactaaaattgcacaatatctagcaacagttgaagaatatcatggacgaaagattaattggaaaagcttatatgaaaaagcattaaatcatgatttcgccgaagtgtttactggtgatataaaaacacctgttaaatatgcgagtagtgaattaaaaaaattattttcgcaagttgaagaagaaatggtagagacctttattgaagaagaaattccattacaatatagagatgtttataagcaacgactgcaagaaggtaaagatgattcattagaaggccaaatactttcagttgctgataaaattgatttgctttatgaaacatttggagaaatacaaaaacgtaatcccgaagaattatttttcgaaatttatgaaatgagtctagaaacaattattcaatttgaccatttagcatctgtacaagattttattaataatatcattccagaaatgttgactgaaaactttatacctagaacagaattaagagaaacaaccatgaacattttaaataaaagaaaagaggaaaatgaatgatatggtattttagcgcagcattctttccatgtgtcttggtagtattatttagtgtaataacaagaagtaaatgggtcggtactattctgacattaattttaattggtgcctcaatctataaagagtatttccataacgagtggattatttttattgatgtagtgtcattattagctggttatttaattatagatcaactcgaatttcataaacatcaagatgaagatcgctaagattaactttaaaataatgtttcaaacaaatttgttgaaacaaaatgatgattaatataatgtgtatttacatactaaaaataacaagataaacgatttgatttaaggcaagcatagttagcacaactatgtttgtttttctttgttcgacatttttacgaacaaacgtttgctttttgtgtgactactttgctaaaatatgtaatgagaaagcaaagagttgagcggaaatataaataatacgttgaaagaggaggcatatgtgacaatggttgaacattatccttttaaaatacattctgattttgagcctcaaggtgaccaaccgcaagcaattaaagaaatcgtggaaggtattaaagcggggaaaagacatcaaactttattaggtgctactggcacagggaaaacatttacgatgagtaatgttattaaagaagttgggaaaccaacgttaattatcgcgcataacaaaacattagcaggacaattatatagtgagtttaaagaattttttcctgaaaacagggtggaatactttgtaagttactatgattattatcaaccagaggcatacgtaccgtctactgacacttttattgaaaaagatgcctcaatcaatgatgaaattgatcaactacgacattctgctacaagtgcattatttgaacgcgatgatgtaattattattgctagtgtaagttgtatatatggtttaggtaatcctgaagaatataaagatttagtagtaagtgttcgagttggtatggaaatggatagaagtgaattacttagaaaacttgtagatgtgcaatatacacgaaatgacatcgatttccaacgaggaacgtttcgagtgcgtggtgatgtagtggaaatattcccagcctctaaagaagaactttgtataagggttgagtttttcggcgatgagattgaccgtatccgagaagttaactacctaacaggtgaagtgttgaaagaaagagaacattttgcgatattcccagcttctcacttcgtaacacgtgaagaaaagttgaaagttgcgattgaacgtattgaaaaagaattggaagaacgattgaaagaattacgagatgagaataaattactagaagcgcaaaggttagaacagcgtaccaactatgatttagaaatgatgcgagagatgggattctgttcaggaattgaaaactattccgtacatttaactttgcgaccactgggttcgacaccatatactttattggattactttggcgatgattggttagtaatgattgatgaatcacatgtgacattaccgcaagttcgaggcatgtataacggagacagagcgcgtaaacaagttttggtggatcatgggtttagattaccgagtgcattagataaccgtccacttaaatttgaagaatttgaagaaaagacaaaacaacttgtgtatgtatctgcaacgcctggaccatacgaaattgaacatacggataagatggttgaacaaattattcgtcctactggtttactggatcctaagattgaggttagacctactgaaaatcaaattgacgatttattaagtgaaattcaaacaagagttgagcgtaatgaacgcgtacttgttacaacgctcactaaaaagatgagtgaagatttaaccacatacatgaaagaagcgggtattaaagttaattatctgcattcagaaatcaagacattagaacgaattgaaataattagagacttacgaatgggtacatatgatgttatcgtaggtattaatttattaagagagggtattgatataccagaagtttctctagttgtcatattagatgcagataaagaagggtttttacgttctaaccgctcattaattcaaacaataggtagagctgcgcgtaacgataaaggtgaagtcattatgtatgccgataaaatgactgattcgatgaagtatgcaattgatgagacacaacgtcgtcgagaaatacagatgaaacataatgaaaaacatggtattacacctaaaacaattaataaaaaaatacatgatttaattagtgctactgttgaaaatgacgaaaataatgacaaagcacaaactgtgatacctaagaagatgacgaaaaaagaacgtcaaaagacaatcgacaatatagaaaaagaaatgaaacaagcagcgaaagatttagatttcgagaaagctacagaattaagagatatgttatttgaattaaaagcagaagggtgacaagtaaatgaaagaaccatccatagtagtaaaaggtgctcgtgcgcataacttgaaagatattgatatcgaactacctaaaaataaattaattgttatgacaggtttatctgggtcaggtaaatcgtcattagcattcgatactatatatgctgaaggacaacgacgttatgttgaatcattaagtgcctatgcgcgtcaatttttaggccaaatggacaaaccagatgttgatacaattgaaggattatcgccagcaatttcaatagatcaaaaaacaacaagtaaaaatccaagatcaactgtagcaacagtaacagaaatatatgattatatacgtttgttatatgcacgtgttggtaaaccttactgtccaaatcacaatatagaaattgaatcgcaaacagtacaacaaatggttgaccgcattatggaattagaggcacgtacaaagattcaattattagcacctgtcatcgctcatcgtaaaggtagtcatgaaaagctaatcgaagatattggtaaaaaaggttatgtacgtttaagaatcgatggcgaaattgttgatgtaaatgatgtacctactttagataagaacaagaatcatacaatagaagttgttgtagaccgattagttgttaaagatggaattgaaacacgactagctgactctatagaaactgccttagagctttcagaaggacaattaacagtcgatgtcattgacggggaagaccttaagttttcagaaagccatgcttgtcctatatgtggattttcaatcggagagttagaaccaagaatgtttagctttaacagtccttttggtgcttgtccgacatgtgatggcttaggccaaaagttaacagtcgatgtagacttggttgttcccgacaaagataagacgctaaacgaaggtgcaatagaaccttggataccgacgagttctgatttttatccaacattgttaaaacgtgtttgtgaagtttataaaatcaatatggataaaccttttaaaaagttaacagaacgtcaacgtgatattttattgtatggttctggtgacaaagaaattgaatttacatttacacaacgtcaaggtggtactagaaaacgaacaatggttttcgagggtgtagttcctaatataagtagacgattccatgaatctccttcagaatatacacgtgaaatgatgagtaaatatatgactgaactaccttgcgaaacttgtcatggaaagcgattgagtcgtgaagcgttatctgtttatgtaggtggtttaaatattggtgaagtagtcgaatattcaatcagtcaagcgctgaactattataaaaacattgatttgtcagaacaagatcaagcgattgcaaatcaaatattgaaagaaattatttcccgactcacttttttaaataatgtgggacttgaatatttaacgttaaacagagcttcaggtacactttcaggtggtgaagcacaacgtattcgattagcaacgcaaattgggtcgcgtttgactggtgtcttatatgtattagatgagccatcaattggactgcatcaaagagataatgatcgattaattaatacacttaaagaaatgagagatttaggaaatactttaattgtagttgaacacgatgatgatacaatgcgtgcggctgattacttagtggatataggtcctggtgctggtgaacatggagggcagattgtgtctagtggtactcctcaaaaggtaatgaaagataaaaaatcattaacaggacaatacttgagtggtaagaaacgtattgaagtacctgaatatcgcagaccggcttcagatcgtaaaatttctatacgtggagctagaagcaacaatcttaaaggggttgatgtggacataccactatcaatcatgacggttgttacaggtgtatcaggttctggtaaaagctcattagtaaatgaagtattatacaaatcattagctcaaaaaattaataaatctaaagtaaagccaggattgtacgataagattgaaggtattgatcaacttgataaaattattgatattgatcaatcaccaataggtagaacgccacgctctaatccagcaacatatactggtgtgtttgatgatatacgtgatgtgtttgcgcaaacaaatgaagctaaaattcgaggatatcaaaaagggcgttttagttttaatgtaaaaggtggacgctgtgaagcttgtaaaggtgacggtattattaaaattgaaatgcattttttacctgatgtttatgttccttgtgaagtgtgtgatggtaaacgatataatcgtgagacactagaggttacttacaaaggtaaaaatattgctgacattttagaaatgactgttgaagaagcaacacaattttttgaaaatattcctaagattaagcgcaagttacaaacactagttgatgttggtcttggatacgtcacattaggtcaacaagctacaacgttatcaggtggtgaggctcaacgtgtgaaacttgcatctgaacttcataaacgttcaactggtaaatctatttatatcctagatgaaccgacaacagggttacatgttgacgatattagtagattattaaaagtattaaaccgattagttgaaaatggtgatactgttgtaattattgaacataacctagatgttatcaaaacagcagactatattatagacttaggtcctgaaggtggtagtggcggtggtactattgttgcgactggcacacccgaagatattgctcagacaaagtcatcatatacaggaaagtatttaaaagaagtacttgaacgagataaacaaaatactgaagataaataagattaaaagaagtgaaggatgttataaatttatccttcgcttctttttattaatttagtaatgaatagtagaaagaaaagatgcgtaaaaagaattatgttaagatagggtcaatctagagtagttaaacataaatcgaactgggagtgggacagaaatgataaagaatcactaatgatttattatgtagtggttctttgtcattagccacagctattgtgtacttaaaaataggaatgcatgagtgcaactcatgcataagaaatactaatttctaaagaaaaagtatttctttatgttggggccccgccaacttgcattgtttgtagaatttcttttcgaaattctttatgttggggccccgccaacttgcattgtttgtagaatttcttttcgaaattctttatgttggggccccgccaactaattccaatatatcattgtagagcttaggtcattgatttttggctcggacttttatggcgatatgaaccatgtaaattaagcaagcaataaattaatgattgatattgacttgtaaaataataataataatgaacaattaatatttattttagcttttcaatgtagattggtgttatatttttgatatgataagaagagatgtaagagtagggataaatacaattgaggtgaacccatgttaacgacagaaaaactagttgaaacattaaagttagatttaatcgctggtgaagaaggactatcgaagccaattaaaaatgctgatatatcaagaccgggcttagagatggcaggttatttttcacattatgcgtcagatagaatacaactattaggaacaacggaactatcgttttacaatttattaccagataaggatcgcgcaggtcgtatgcgtaaactatgcagaccagaaacgcctgcaattattgtgacacgtggattgcagccaccagaagaattagttgaagctgcaaaagaattaaataccccacttatagttgctaaagatgcgactacaagtttaatgagtcgcttaacaacgtttttagagcatgcacttgcaaagacgacatctttacatggtgttttagtagatgtttacggtgttggtgtactaattaccggtgattcaggaataggtaaaagtgagactgcgttggaattagttaaacgtgggcatagattagtagcagatgataatgtagaaatacgtcaaattaataaagatgaactaatagggaaaccaccaaagttaatagaacatctattagaaatacgtggactaggtattatcaatgttatgactttatttggcgcgggttcaatattaactgaaaaacgaattagattaaatattaatttggaaaactggaacaagcaaaagttatatgaccgcgtaggtcttaatgaagagacgctaagtattttagatactgaaatcactaaaaaaacaatacctgtaagacctggtagaaatgttgcggtaattattgaggtcgctgcaatgaactatcgattaaatatcatgggcattaacacggccgaagaatttagtgaaagattaaatgaagaaattatcaagaacagtcataagagtgaggagtaggttgaatgggtattgtatttaactatatagatcctgtggcatttaacttaggaccactgagtgtacgatggtatggaattatcattgctgtcggaatattacttggttactttgttgcacaacgtgcactagttaaagcaggattacataaagatactttagtagatattattttttatagtgcactatttggatttatcgcggcacgaatctattttgtgattttccaatggccatattacgcggaaaatccaagtgaaattattaaaatatggcatggtggaatagcaatacatggtggtttaataggtggctttattgctggtgttattgtatgtaaagtgaaaaatttaaacccatttcaaattggtgatatcgttgcgccaagtataattttagcgcaaggaattggacgctggggtaactttatgaatcacgaggcacatggtggatcggtgtcacgcgcttttttagaacaattacatttgcctaattttataatagaaaatatgtatattaacggccaatattatcatccaacattcttatatgaatccatttgggatgtcgctggatttattatcttagttaatattcgtaaacatttaaaattaggagaaacattctttttatatttaacttggtattcaattggtcgattctttatagaaggattacgtacagatagcttaatgctcacaagtaatattagagttgcacaattagtatcaattcttttaattttaataagtataagtttaattgtatatagaaggattaagtataatccaccgttgtatagcaaagttggggcgcttccatggccaacaaaaaaagtgaagtagtgatagtttgaggaaatttttatcaaaaacacatcatcatacaaaccctttatggcgtgtataccgtcttgttaaattttcgaaagtttttaagaatgtaattatcattgaattttcgaaatttattccaagtatggtactgaaaagacatatatataaacaacttttaaatattaatatcggtaatcaatcgtcgatagcttataaagtaatgttagatattttttacccagaactgattacgattggtagtaacagtgttattggttacaatgtaacaattttgacgcatgaagcattagttgatgaatttcgttatggaccagtgacgataggatctaacactttgattggtgcaaatgctaccattttacccggtataacgattggtgacaatgtaaaagttgcagctggtacggttgtttcaaaagatataccggataatggatttgcatatggcaaccctatgtatataaaaatgattaggaggtgacaattttatggcgcaaaagaataataatgtaattccaatgacttttgatgatgcattttatcgtaaaatggctaaacagaagtttaaacaaagagaatataaacgagctgctgaatactttgaaaaagtgttagaattgtcacctgatgatatggaaattcaaattgattatgcacaatgtctagtgcaacttggtattgctaaaaaagcagaacatttattttatgacaatattatttataataggcatctagaagatagcttttatgaattgagtcagctcaacattgaagttaacgaaccaaacaaggcattcttgtttggtattaattatgttattgttagcgacgaccaagattatagagatgaattagatcaaatgtttgatgtgaaatatcaaagtgaagaacaaattgaacttgaagctcaattgtttgtagttcaaatactattccaatatcttttttctcaaggtcgattaaaagatgcaaagaattatgtcttacatcaaccacaagaagttcaagatcatcgtgtagtacgtaatttattggcaatgtgttatttatatctcggtgaatatgatacggctaaagcattgtacgaagcactattacaagaggatagtacagatatatatgcattatgccattatactttgctactttataacactaaggaaaatgaacaatatcaaaaatatttaaaaatattaaacaaagttgtacctatgaatgacgatgaaagttttaaattaggtattgtattaagttatttaaagcagtatcgtgcatcacaacaattgttgtaccctttatataaaaaagggaaatttttatcaattcaaatgtacaatgctttagcatataattattattatttaggtgaagaagacgaaagtcattactactgggataaattgaagcaaatttctaaagtggaaattggacatgcgccttgggtaattgaaaatagcaaagaagtttttgaccaacatattttgccattacttcaaagtgatgacagtcattatcgtttatatggtatttttttattggatcaattaaatggtaaagaaattgtgatgacggaaagtatttggcaggttttggaaaatctaaataattatgagaaattgtatttaacgtatttagttcaaggtttaacgctcaataaattagacttcattcatcgcggcttattaacgctttaccataatgaattatttgtaagtgaaaatgatgtaatggttgcatggattaatcaaggtgaactcataattgctgaaaaagtagatttaactgatgttgagccatatatcggtgcgtttatttatttgtattttaaaaatcaacctcgaaacgttacaaagaagcaaattacaacatggttaggcataacacaatataaactgaacaaaatgattgaatttctcttgagcatatagatttatgaaaagttagatttattatataatgcgcataatgattaataatgaggaggcgttaataaaatgactgaaatagattttgatatagcaattatcggtgcaggtccagctggtatgactgctgcagtatacgcatcacgtgctaatttaaaaacagttatgattgaaagaggtattccaggcggtcaaatggctaatacagaagaagtagagaacttccctggtttcgaaatgattacaggtccagatttatctacaaaaatgtttgaacacgctaaaaagtttggtgcagtttatcaatatggagatattaaatctgtagaagataaaggcgaatataaagtgattaactttggtaataaagaattaacagcgaaagcggttattattgctacaggtgcagaatacaagaaaattggtgttccgggtgaacaagaacttggtggacgcggtgtaagttattgtgcagtatgtgatggtgcattctttaaaaataaacgcctattcgttatcggtggtggtgattcagcagtagaagagggaacattcttaactaaatttgctgacaaagtaacaatcgttcaccgtcgtgatgagttacgtgcacagcgtattttacaagatagagcattcaaaaatgataaaatcgactttatttggagtcatactttgaaatcaattaatgaaaaagacggcaaagtgggttctgtgacattaacgtctacaaaagatggttcagaagaaacacacgaggctgatggtgtattcatctatattggtatgaaaccattaacagcgccatttaaagacttaggtattacaaatgatgttggttatattgtaacaaaagatgatatgacaacatcagtaccaggtatttttgcagcaggagatgttcgcgacaaaggtttacgccaaattgtcactgctactggcgatggtagtattgcagcgcaaagtgcagcggaatatattgaacatttaaacgatcaagcttaattcgaagtcgaattaagatgttgagctgtaaattatttggatatttattttaatagtgtcatcacagcgttaaaataatgtcttacttttaaattaaagcaaattatatagaaaactagaacttagtacgtatcatttgtgcgtttcaatgagttctagtttttttatatgttatattaaacttataactttatgggagtgggacagaaatgataaagagccactaatgatttattatgtagtggttcttaaacattagccacagctaatgtgtacttaaaaataggaatacatgagtaaaactcatgcataagaaatactaatttctatagaaaaagtattactttatcgttgtcccaccccaacttgcacattattgtaagctgactttccgccagcttctgtgttggggccccgccaacttgcacattattgtaagctgacttttcgtcagcttctgtgttggggccccgccaacttgcattgtctgtagaaattgggaatccaatttctctatgttggggcccacaccccaactcgcattgcctgtagaatttcttttcgaaattctctgtgttggggcccacaccccaactcgcattgcctgtagaatttcttttcgaaattctctgtgttggggcccctgactagagttgaaaaaagcttgttgcaagcgcattttcattcagtcaactactagcaatataatattatagaccctaggacattgatttatgtcccaagctccttttaaatgatgtatatttttagaaatttaatctagacatagttggaaataaatataaaacatcgttgcttaattttgtcatagaacatttaaattaacatcatgaaattcgttttggcggtgaaaaaataatggataataatgaaaaagaaaaaagtaaaagtgaactattagttgtaacaggtttatctggcgcaggtaaatctttggttattcaatgtttagaagacatgggatatttttgtgtagataatctaccaccagtgttattgcctaaatttgtagagttgatggaacaaggaaatccatccttaagaaaagtggcaattgcaattgatttaagaggtaaggaactatttaattcattagttgcagtagtggataaagtcaaaagtgaaagtgacgtcatcattgatgttatgtttttagaagcaagtactgaaaaattaatttcaagatataaggaaacgcgtcgtgcacatcctttgatggaacaaggtaaaagatcgttaatcaatgcaattaatgatgagcgagagcatttgtctcaaattagaagtatagctaattttgttatagatactacaaagttatcacctaaagaattaaaagaacgcattcgtcgatactatgaagatgaagagtttgaaacttttacaattaatgtcacaagtttcggttttaaacatgggattcagatggatgcagatttagtatttgatgtacgatttttaccaaatccatattatgtagtagatttaagacctttaacaggattagataaagacgtttataattatgttatgaaatggaaagagacggagattttctttgaaaaattaactgatttgttagattttatgatacccgggtataaaaaagaagggaaatctcaattagtaattgccatcggttgtacgggtggacaacatcgatctgtagcattagcagaacgactaggtaattatctaaatgaagtatttgaatataatgtttatgtgcatcatagggacgcacatattgaaagtggcgagaaaaaatgagacaaataaaagttgtacttatcggtggtggcactggcttatcagttatggctaggggattaagagaattcccaattgatattacggcgattgtaacagttgctgataatggtgggagtacagggaaaatcagagatgaaatggatataccagcaccaggagacatcagaaatgtgattgcagctttaagtgattctgagtcagttttaagccaactttttcagtatcgctttgaagaaaatcaaattagcggtcactcattaggtaatttattaatcgcaggtatgactaatattacgaatgatttcggacatgccattaaagcattaagtaaaattttaaatattaaaggtagagtcattccatctacaaatacaagtgtgcaattaaatgctgttatggaagatggagaaattgtttttggagaaacaaatattcctaaaaaacataaaaaaattgatcgtgtgtttttagaacctaacgatgtgcaaccaatggaagaagcaatcgatgctttaagggaagcagatttaatcgttcttggaccagggtcattatatacgagcgttatttctaacttatgtgtgaatggtatttcagatgcgttaattcattctgatgcgcctaagctatatgtttctaatgtgatgacgcaacctggggaaacagatggttatagcgtgaaagatcatatcgatgcgattcatagacaagctggacaaccgtttattgattatgtcatttgtagtacacaaactttcaatgctcaagttttgaaaaaatatgaagaaaaacattctaaaccagttgaagttaataaggctgaacttgaaaaagaaagcataaatgtaaaaacatcttcaaatttagttgaaatttctgaaaatcatttagtaagacataatactaaagtgttatcgacaatgatttatgacatagctttagaattaattagtactattcctttcgtaccaagtgataaacgtaaataatatagaacgtaatcatattatgatatgataatagagctgtgaaaaaaatgaaaatagacagtggttctaaggtgaatcatgttttaaataagaaaggaatgactgtacgatgagctttgcatcagaaatgaaaaatgaattaactagaatagacgtcgatgaaatgaatgcaaaagcagagctcagtgcactgattcgaatgaatggtgcacttagtctttcaaatcaacaatttgttataaatgttcaaacggaaaatgcaacaacggcaagacgtatttattcgttgattaaacgtgtctttaatgtggaagttgaaatattagtccgtaaaaaaatgaaacttaaaaaaaataatatttatatttgtcgtacaaagatgaaagcgaaagaaattcttgatgaattaggaattttaaaagacggcatttttacgcatgaaattgatcattcaatgattcaagatgacgaaatgagacgcagttacttgagaggagcttttctggcaggtggctcagtgaataaccctgaaacatcttcgtaccatttggaaattttttctcaaaatgagagtcatgcagaaggcttaacgaaactaatgaatagttatgagttgaatgccaaacatttagagcgaaaaaaaggaagtattacgtatttaaaagaagcggaaaagatttcggattttcttagtttgataggtggctatcaagcgttattaaaatttgaagacgtacgtattgtaagagatatgcgtaattctgttaaccgactcgttaattgtgaaacggccaatctaaataaaacagttagtgctgcgatgaaacaagttgagagcattaaattgattgataaagaaattggtattgaaaatttaccagacaggttgagagagattgctagaattcgagtagaacatcaagaaatttcgttgaaagagcttggagaaatggtatcaactggtccaatttcaaaatcaggtgtaaatcaccgattaagaaaactgaatgatttagccgataagattagaaatggtgaacaaatagaattataagtaagaaggtgtttttggtagtgaattatcaaaaacacttttttatgattaaaaagtgtttaatgaataatagtcgactaactattaaattgagctgggaagtttaatgaaggaaattcaataaccaagtgatgcctaattttctcattaaatagcatcatatgtatcaatttggtcataagaaaatatgaatgtgataattaattgagtccctgaaagtccctgatcatagacaaaaacaaaatcagcataaataagaatcccgacattgcgggattctctgtattgaaaagtattgtattttattaaaacagcctccttgaagggaattgaacccctatcttaagaaccggaatcttacgtgttatccattacaccacaaggagcaaatatgtaatcatatctctgtactatgagaagtaaaataagtacaatctaaaatagatattatcagtttacaaaggaaagagaaaagcgtcaaacaatgtaactatttaaagtcaaagtgtttgaccaaatttgacttaatatgtaaaataatgagtaacagttattacaaggaggaaatatagatgaatttaattcctacagttattgaaacaacaaaccgcggtgaacgtgcatatgatatatactcacgtttattaaaagaccgtattattatgttaggttcacaaattgatgacaacgtagcaaattcaatcgtatcacagttattattcttacaagcgcaagactcagagaaagatatttatttatacattaattcaccaggtggaagtgtaacagctggttttgcgatttatgatacaattcaacacattaaacctgatgttcaaacaatttgtatcggtatggctgcatcaatgggatcattcttattagcagctggtgcaaaaggtaaacgtttcgcgttaccaaatgcagaagtaatgattcaccaaccattaggtggtgctcaaggacaagcaactgaaatcgaaattgctgcaaatcacattttaaaaacacgtgaaaaattaaaccgcattttatcagagcgtactggtcaaagtattgaaaaaatacaaaaagacacagatcgtgataacttcttaactgcagaagaagctaaagaatatggcttaattgatgaagtgatggtacctgaaacaaaataattcaaagtaaagagtagactaagctgtctgctctttttgtatgagtaaaccaaggtgtcaataatttgtttactatactttgagcggaaatatgattgaatgaagctagttgaaccgtaactatatgaaatgttcccttcaaagtagacattgaaaggaacatttcaatcctttgtttgtaagtcgctctagacattacatttagtacatatgttgtttctaatgctcattaatggtattgattattctttaattaaatcttcaagtgccatttttaaattactatatttaaattggaatcccaatgcttgaattttattaggtaatactttttgagtatccaatactactgttgacatttgaccaagtatgagacgcattgcaagacttggtgcccaagtttcatgaggcttatgcatagctcttgctaaagtgtagccaaataaattttgacgttcaggtataggtgcagttaaattaaacggaccactagctgactcgttatttattaaaaataaaatagcttgaattaaatcattgatatgaatccatgaataccattgttgaccagaacctaatttaccaccaatgtaatattcgtatggtagtttcattgtttgtaacgcaccgccttcattcgataaaattataccgaaacgaccgatgacaactcgtgtacctaattgttcaaattgttgtgcgaaacgttcccattgatacacaatatctgataagaaatcaaaaggtaaagttttataaacttctgtgtaactcataaataaatcaggaggatagtaaccagtggcactagcattaaataaagctttaggtgctttattacgtgatttaaacaattcatataaagcttgcgtagattgaattctacttagcattagcgtttgtttatattccggtgtccatcgtttattcaatgtagcacctgctaagttgatgaccacatcgatattttgaggaactttgtgttcccacccagatttagcccagttgacatatgaaattttcttatcatttgaaatttggtcgtgtcgcgttaatatcgtgatatgtgaatctgattttttaatttcattaactaattgagatccaaccataccagtcccaccagtaattaagtattgtttcattatcattcaccccatgtaattttgtatttagttactatttaataatcattattgttgttcaaaggttatacattatttagacaataatatgtcaataactttttttgaattgtattttaataaaaatgatataagttataataaaggtgtaccttcgataacgaataaacatctcttaaaagtatgtgtaaaacgctgcatgatacaaacgaaggtaaaaatttgactccctttagtagtggacccgtacgttaatcgtgcgggtcgtttttatttatttcttattcccattatacatcaatttaaagcattaattttttaaacaaatttaagaatacatagtaatataacaatctaaacataaaaacttttaacacaacacttaaaccaatgctttaattttcaatacgtagctataatttgttgtaaaatcaaaaaggttaaaatgttaattttcaaaaaaaggctcaaaatatgtttgatttagttattaaatgttaagatatataagactactatttctttgtaaaaatgaatccgatttacgagtgagtaatagtgaaggcagttttaagttgaagaaggcaaaaagagtaaatgtttattaatatttgtagaaactaggtaagcaaattagttgtgaaaatgttaatggttgcgtgataatttctatatttaaattagtttgaagtgagggagagtatgtcgaatcaaaattacgactacaataaaaatgaagatggaagtaagaagaaaatgagtacaacagcgaaagtagttagcattgcgacggtattgctattactcggaggattagtatttgcaatttttgcatatgtagatcattcgaataaagctaaagaacgtatgttgaacgaacaaaagcaggaacaaaaagaaaagcgtcaaaaagaaaatgcagaaaaagagagaaagaaaaagcaacaagaggaaaaagagcagaatgagctagattcacaagcaaaccaatatcagcaattgccacagcagaatcaatatcaatatgtgccacctcagcaacaagcacctacaaagcaacgtcctgctaaagaagagaatgatgataaagcatcaaaggatgagtcgaaagataaggatgacaaagcatctcaagataaatcagatgataatcagaagaaaactgatgataataaacaaccagctcagcctaaaccacagccgcaacaaccaacaccaaagccaaataataatcaacaaaacaatcaatcaaatcagcaagcaaaaccacaagcaccacaacaaaatagccaatcaacaacaaataaacaaaataatgctaatgataagtagtatttagtcaaacaaaaatgaaccagtatgacagacaacacaattaattaggttgtctcgaatattggttcttatttttataattgttaattaggggagagatgatacttaaatagttagttatttattttacggatagtgaaatttattttgagtgaggtgggacagaaatgatattttcgcaaaatttatttcgtcgtcccaccccaacttccattgcctgtagaaattgggaggagccaatttcactatgttggggccccaccccaactcgcattgcctgtagaatttcatttcgaaattctctatgttggggcccctgactttaattgaaaaaagcttgttacaagtgcattttcgttcggttaactactactaatgtgactttttggattctagagcattgatttatgtcctagtctcaaataataagcaaatgattatcgagtcagtataagggtatacatttgactacagcgaataaaataaaacgttttgttgaataacaaatcgaaaatatattgcaagcgctttatcaaattatttagaaaatttaagttttatgcttgcaatttttgaaatagaatagtactattgcaagtgtaaagaggttaatttttgtcccacgcgggacttaaaaaggcaacaactggttgtgacatatccttatttacatttataaatataaggaggaggtagtagtgaaagacttattgcaagcacagcaaaagcttataccggatctcatagataaaatgtataaacgtttttctattcttactactatctcaaaaaatcagcctgtcggacgtcgaagtttaagcgaacatatggatatgactgaacgtgtactgcgttctgaaacagatatgcttaagaaacaagatttgataaaagttaagcctaccggaatggaaattacagctgaaggtgagcaactgatttcgcaattgaaaggttactttgatatctatgcagatgataatcgtctgtcagaaggtattaagaataaatttcaaattaaggaagttcatgttgttcctggtgatgctgataatagtcaatctgttaaaacagaattaggtagacaagcaggtcaattacttgaaggcatattacaagaagacgcgatagttgctgtaactggcggatccacgatggcatgtgttagtgaagcaattcatttattaccatataatgtattcttcgtaccagccagaggtggactaggcgaaaatgttgtctttcaggcaaacacaattgcagccagtatggcacaacaagctggcggttattatacgacgatgtatgtacctgataatgtcagtgaaacaacatataatacattgttgttagagccatcagtcataaacactttagacaaaattaaacaagcaaacgttatattacacggcattggtgatgcgctgaagatggcgcatcgacgtcaatcacctgaaaaggtcattgaacaacttcaacatcatcaagctgtcggagaggcatttggttattattttgatacacaaggtcaaattgtccataaggttaaaacaattggacttcaattagaagaccttgaatcaaaagactttatttttgcagttgcaggaggcaaatcgaaaggtgaagcaattaaagcatacttgacgattgcacccaagaatacagtgttaatcactgatgaagccgcagcaaagataatacttgaataagagataaaaagtttaatactttttaaatatcattttaaaggaggccattataatggcagtaaaagtagcaattaatggttttggtagaattggtcgtttagcattcagaagaattcaagaagtagaaggtcttgaagttgtagcagtaaacgacttaacagatgacgacatgttagcgcatttattaaaatatgacactatgcaaggtcgtttcacaggtgaagtagaggtagttgatggtggtttccgcgtaaatggtaaagaagttaaatcattcagtgaaccagatgcaagcaaattaccttggaaagacttaaatatcgatgtagtattagaatgtactggtttctacactgataaagataaagcacaagctcatattgaagcaggcgctaaaaaagtattaatctcagcaccagctactggtgacttaaaaacaatcgtattcaacactaaccaccaagagttagacggttctgaaacagttgtttcaggtgcttcatgtactacaaactcattagcaccagttgctaaagttttaaacgatgactttggtttagttgaaggtttaatgactacaattcacgcttacacaggtgatcaaaatacacaagacgcacctcacagaaaaggtgacaaacgtcgtgctcgtgcagcggcagaaaacatcatccctaactcaacaggtgctgctaaagctatcggtaaagttattcctgaaatcgatggtaaattagatggtggtgcacaacgtgttcctgtagctacaggttcattaactgaattaacagtagtattagaaaaacaagacgtaacagttgaacaagttaacgaagctatgaaaaatgcttcaaacgaatcattcggttacactgaagacgaaatcgtttcttcagacgttgtaggtatgacttacggttcattattcgacgctacacaaactcgtgtaatgtcagttggcgaccgtcaattagttaaagttgcagcttggtatgataacgaaatgtcatatactgcacaattagttcgtacattagcatacttagctgaactttctaaataattttagtatagtttttattcaaatacgctagtgctcagaactatttagcattaattaaagcttatgagtaagcggggagcacaaacgcttctccgcttatttttatataaaatttcctaattacaaggaggaaacaccatggctaaaaaaattgtttctgatttagatcttaaaggtaaaacagtcctagtacgtgctgattttaacgtacctttaaaagacggtgaaattactaatgacaaccgtatcgttcaagctttacctacaattcaatacatcatcgaacaaggtggtaaaatcgtactattttcacatttaggtaaagtgaaagaagaaagtgataaagcaaaattaactttacgtccagttgctgaagacttatctaagaaattagataaagaagttgttttcgtaccagaaacacgcggcgaaaaacttgaagctgctattaaagaccttaaagaaggcgacgtattattagttgaaaatacacgttatgaagatttagacggtaaaaaagaatctaaaaatgatccagaattaggtaaatactgggcatctttaggtgatgtgtttgtaaatgatgcttttggtactgcgcatcgtgagcatgcatctaatgttggtatttctacacatttagaaactgcagctggattcttaatggataaagaaattaagtttattggcggcgtagttaacgatccacataaaccagttgttgctattttaggtggagcaaaagtatctgacaaaattaatgtcatcaaaaacttagttaacatagctgataaaattatcatcggcggaggtatggcttatactttcttaaaagcgcaaggtaaagaaattggtatttcattattagaagaagataaaatcgacttcgcaaaagatttattagaaaaacatggtgataaaattgtattaccagtagacactaaagttgctaaagaattttctaatgatgccaaaatcactgtagtaccatctgattcaattccagcagaccaagaaggtatggatattggaccaaacactgtaaaattatttgcagatgaattagaaggtgcgcacactgttgtatggaatggacctatgggtgtattcgagttcagtaactttgcacaaggtacaattggtgtatgtaaagcaattgcaaaccttaaagatgcaattacgattatcggtggcggtgattcagctgcagcagcaatctctttaggttttgaaaatgacttcactcatatttcaactggtggcggcgcgtcattagagtacctagaaggtaaagaattgcctggtatcaaagcaatcaataataaataataaagtgatagtttaaagtgatgtggcatgtttgtttaacattgttacgggaaaacagtcacaagatgacatcgtgtttcatcacttttcaaaaatatttacaaaacaaggagtgtctttaatgagaacaccaattatagctggtaactggaaaatgaacaaaacagtacaagaagcaaaagacttcgtcaatgcattaccaacattaccagattcaaaagaagtagaatcagtaatttgtgcaccagcaattcaattagatgcattaactactgcagttaaagaaggaaaagcacaaggtttagaaatcggtgctcaaaatacgtatttcgaagataatggtgcgttcacaggtgaaacgtctccagttgcattagcagatttaggcgttaaatacgttgttatcggtcattctgaacgtcgtgaattattccacgaaacagatgaagaaattaacaaaaaagcgcacgctattttcaaacatggaatgactccaattatatgtgttggtgaaacagacgaagagcgtgaaagtggtaaagctaacgatgttgtaggtgagcaagttaagaaagctgttgcaggtttatctgaagatcaacttaaatcagttgtaattgcttatgaaccaatctgggcaatcggaactggtaaatcatcaacatctgaagatgcaaatgaaatgtgtgcatttgtacgtcaaactattgctgacttatcaagcaaagaagtatcagaagcaactcgtattcaatatggtggtagtgttaaacctaacaacattaaagaatacatggcacaaactgatattgatggggcattagtaggtggcgcatcacttaaagttgaagatttcgtacaattgttagaaggtgcaaaataatcatggctaagaaaccaactgcgttaattattttagatggttttgcgaaccgcgaaagcgaacatggtaatgcggtaaaattagcaaacaagcctaattttgatcgttattacaacaaatatccaacgactcaaatcgaagcgagtggcttagatgttggactacctgaaggacaaatgggtaactcagaagttggtcatatgaatatcggtgcaggacgtatcgtttatcaaagtttaactcgaatcaataaatcaattgaagacggtgatttctttgaaaatgatgttttaaataatgcaattgcacacgtgaattcacatgattcagcgttacacatctttggtttattgtctgacggtggtgtacacagtcattacaaacatttatttgctttgttagaacttgctaaaaaacaaggtgttgaaaaagtttacgtacacgcatttttagatggccgtgacgtagatcaaaaatccgctttgaaatacatcgaagagactgaagctaaattcaatgaattaggcattggtcaatttgcatctgtgtctggtcgttattatgcaatggatcgtgacaaacgttgggaacgtgaagaaaaagcttacaatgctattcgtaattttgatgccccaacttatgcaactgccaaagaaggtgtagaagcaagctataatgagggcttaactgacgaattcgtagtaccattcatcgttgagaatcaaaatgacggtgttaatgatggagatgcagtgatcttctataatttccgacctgatagagcagcgcaattatcggaaatttttgcgaacagagcattcgaaggctttaaagttgaacaagttaaagacttattctatgcaacattcactaagtataatgacaatatcgatgcggctatcgtcttcgaaaaagttgatttaaataatacaattggtgaaattgcacaaaataacaatttaactcaattacgtattgcagaaactgaaaaataccctcacgttacttactttatgagtggtggacgtaacgaggaatttaaaggtgaacgccgtcgtttaattgattcacctaaagttgcaacgtatgacttgaaaccagaaatgagtgcttatgaagttaaagatgcattattagaagagttaaataaaggtgacttggacttaattattttaaactttgctaaccctgatatggttggacatagtggtatgcttgagccgacaatcaaagcaatcgaagcggttgatgaatgtttaggagaagtggttgataagattttagacatggacggttatgcaattattactgctgaccatggtaactctgatcaagtattgacggatgatgatcaaccaatgactacgcatacaacgaacccagtaccagtgattgtaacaaaagaaggcgttacacttagagaaactggtcgcttaggtgacttagcacctacattattagatttattaaatgtagaacaacctgaagatatgacaggtgaatctttaattaaacactaatattgtaaaagatgttaagtaaacgcttaatgacacttattttttgaaaataatagtaatatcattttgttaaatgaaagaataaagctataataattatagaataactatttaaaggagattataaacatgccaattattacagatgtttacgctcgcgaagtcttagactctcgtggtaacccaactgttgaagtagaagtattaactgaaagtggcgcatttggtcgtgcattagtaccatcaggtgcttcaactggtgaacacgaagctgttgaattacgtgatggagacaaatcacgttatttaggtaaaggtgttactaaagcagttgaaaacgttaatgaaatcatcgcaccagaaattattgaaggtgaattttcagtattagatcaagtatctattgataaaatgatgatcgcattagacggtactccaaacaaaggtaaattaggtgcaaatgctattttaggtgtatctatcgcagtagcacgtgcagcagctgacttattaggtcaaccactttacaaatatttaggtggatttaatggtaagcagttaccagtaccaatgatgaacatcgttaatggtggttctcactcagatgctccaattgcattccaagaattcatgattttacctgtaggtgctacaacgttcaaagaatcattacgttggggtactgaaattttccacaacttaaaatcaattttaagcaaacgtggtttagaaactgcagtaggtgacgaaggtggtttcgctcctaaatttgaaggtactgaagatgctgttgaaacaattatccaagcaatcgaagcagctggttacaaaccaggtgaagaagtattcttaggatttgactgtgcatcatcagaattctatgaaaatggtgtatatgactacagtaagttcgaaggcgaacacggtgcaaaacgtacagctgcagaacaagttgactacttagaacaattagtagacaaatatcctatcattacaattgaagacggtatggacgaaaacgactgggatggttggaaacaacttacagaacgtatcggtgaccgtgtacaattagtaggtgacgatttattcgtaacaaacactgaaattttagcaaaaggtattgaaaacggaattggtaactcaatcttaattaaagttaaccaaatcggtacattaactgaaacatttgatgcaatcgaaatggctcaaaaagctggttacacagcagtagtttctcaccgttcaggtgaaacagaagatacaacaattgctgatattgctgttgctacaaacgctggtcaaattaaaactggttcattatcacgtactgaccgtattgctaaatacaatcaattattacgtatcgaagatgaattatttgaaactgctaaatatgacggtatcaaatcattctataacttagataaataattttctttataatcaaatgctgacataattttagttgaggattattatgacggtataaattaaataaagattttgagttcacgcttaaataagttcacgcttaaatttatagcctgccacagagttgagactgtggtaggttttttattttgaagtattaatcataacagactaataatcatgaggtaactaataacacatatttaacttgtattcttaaactggtataataaatttatgttgaaatgaatattgtatgacagggtattcacttttattaaaaggtaaaattaaataaaggttttatagaacgtatttaaatatatgaggagtaaacaaatggctgatagaacgaataaagaaattaaaacaggacgctttattgcaactgcatcaatcgtattctcaatattattgattattcattactttgtttcgttggataatgcgactgccaaagcattacttaatttaacgaatcaaaacacttcagataaagcgattgattacattttaaacagctttagattcactggtattatgtatattttggcttatctagcaggcttcatcactttttggaatcgacatacttatgtgtggtggtttatgtttgcagtttatgtatcaaatagtttgtttacgttgattaatttatcaatcacaattcaagcaataaaagctgcacacggtgcgtacttaacattgccaattttaattgttattataggttcggttgcattagcgatttatatgcttgttgtttctatcaaacgtaaaagtacatttaatcgctagaaaattgattttaacaataaaaatatgatatactacttgtcgtatataaggaacggaggacaatttatgcatacatttttaatcgtattattaatcattgattgtattgcattaataactgttgtactactccaagaaggtaaaagcagtggactttcaggtgccatcagtggtggtgctgagcagttattcggtaaacaaaaacaacgtggcgtcgatttattcttaaatagattaacaattattttatcaatattattttttgtacttatgatttgcataagttatcttggtatgtaaggtccggcgatgtaaatgtcgggcttttttatttataattaagaatgtaatagtttaacaataagctatgtaaaatatatagcctagttaagtatgcaaagggagcgttagatttatgcagataaaattaccaaaacctttcttttttgaggaaggtaaacgtgccgtgttattactacatggttttacaggcaattcgtctgatgttcgtcaattaggtcgatttttacaaaagaaaggttatacatcatatgcaccgcaatatgaaggccacgcggcaccaccagatgaaatactgaaatctagtcctttcgtttggtttaaagatgcgttagatggttatgattatcttgttgaacaaggttatgatgaaattgttgttgctggtctatcattaggtggggattttgctttaaaattaagcttaaatagagatgtaaagggtattgtaacgatgtgtgctcctatgggtggcaaaactgaaggtgccatttatgaaggctttttagaatatgcacgcaattttaaaaagtatgaaggtaaagatcaagagactattgataatgaaatggatcattttaaaccaactgaaactttaaaagaactaagtgaagcattagatacgattaaagagcaagttgatgaagtgttggatcctattttagtgattcaagcagaaaacgacaatatgattgatccacaatccgcaaattatatatatgaccatgtagattctgatgacaaaaatatcaagtggtacagtgaatctggacatgttattacgattgataaagagaaagaacaagtatttgaagatatttatcaatttttagagtcattagactggtcagaataaaaagagattttaacattagaaaggaggggcataatgaatttaaagcaatctatagaagagattattaatcaacctgaatatgaacctatgtcagtgtcagattttcaagatgcattaggtttaagcagtgccgactcgtttagagatttaattaaggtgcttgtggagttagaacaatcaggattaatcgaacgtacaaaaacagacagataccaaaaaaagcatagttatagaggtcaatcaaaattgataaaaggaacgttaagtcaaaataaaaaaggctttgcattcttaagacctgaagatgaggatatggaagatatatttattcccccgacgaaaattaatcgtgccttggatggagatactgttattgtagaaatccatcaatcaaaaggtgaacataaaggtaaaatcgaaggggaagttaagtcgattgagaagcattctgtaactcaagttgttggtatgtatagtgaagctagacattttggctttgttattccggatgataaacgtattatgcaagatattttcattcctaaaggtcaaagtttaggcgcagtcgatggtcataaggtacttgtacaaattactaagtatgctgatggttcagataatccagaaggacatatttctgctattttaggacataaaaatgatcctggcgtagatattttatctattatctatcaacatggcatagaaattgaatttcctgatgaagtgttacaagaagctgaagcagtacctgatcatattgaaaatactgaaattaaaggccgtcatgatttacgtgatgaattgacaatcacaattgatggtgctgatgctaaagacttagatgacgcaattagtgttaaaaagttagcgaacggtaatacgcaattaactgtaagtattgctgatgtcagctattatgtaacagaaggttctgcattggataaagaggcatatgatagagcgacaagtgtatatcttgttgaccgtgtaattccaatgattccacatcgattaagtaatggtatttgttcattgaatcctaatgttgatcgtttaactctaagctgtcgcatggaaatcgatgctagtggtcgcgttgttaaacatgaaatttttgatagtgttatacattctgattatcgaatgacgtatgatgcggtaaatcagattattactgaaaaggatcctaacattcgcgaacaatataatgaaattacgcctatgctagatttagcacaagatttatctaatcgtttgattcaaatgagaaaacgacgtggtgaaatcgattttgatattagtgaagcaaaagtattagttaacgaagacggtataccaacagatgttcaattaagacaacgtggcgagggtgaacgtctaattgaatcatttatgttaattgcaaatgaaacagttgctgaacattttagtaagttagatgtaccttttatttaccgagtgcatgagcaacctaaatcagatcgcttaagacaattctttgattttattacaaactttggcatcatgattaagggtactggcgaagatattcatccaacaacacttcaaaaggttcaagaagaagtagaaggtcgacctgaacaaatggtcatttcaacaatgatgttgcgttcaatgcaacaagcgcattatgatgatgtgaacttgggacattttggcttatcagctgaatattatacgcattttacatcaccaattagacgttatcctgatttaacagttcatcgtttaatccgtaagtatttaattgagaaatcaatggataacaaagaagtgaagcgttgggaagacaaattgcctgagttagctaaacatacttctaaacgtgaacgtcgtgctattgaggcagaacgtgatactgatgaattgaaaaaagcagaatatatgattcaacatattggtgatgaatttgaaggtattgtcagctcagtagctaacttcggtatgttcattgaattgccaaatacgatagaaggtatggttcatattgcgaatatgactgatgattattaccgttttgaagagcgtcaaatggcattaattggtgagcgtcaagctaaagtatttagaattggtgacacagttaaggttaaagtgacgcatgttgatgtagatgaacgattaattgattttcaaattgtaggtatgcctttaccgaaaaatgatcgatcacagcgcccagcgcgaggtaagacaattcaagccaaaacgcgtggtaaatcattagataaatcaaaatctgatgataagggtcgtaagaaaaaaggtaagcaacgtaaaggtaaaaaccaacgtaataatgataaatcaggtaatagtaagcataagccattttataaagataaaagtgtgaaaaagaaagcacgtcgtaagaaaaaataagcagcaatgaggtgagtatgaatggctaagaagaaatcaccaggtacattagcggaaaatcgtaaggcaagacatgattataatattgaagatacgattgaagcgggaattgtattgcaaggcacagaaataaaatcaattcgccgaggtagtgctaaccttaaagatagttatgcgcaagttaaaaacggtgaaatgtatttgaataatatgcatatagcaccatacgaagaagggaatcgttttaatcacgatcctcttcgttctcgaaaattattattgcacaagcgtgaaatcattaaattgggtgatcaaacacgtgagattggttattcgattgtgccgttaaagctttatttgaagcatggacattgtaaagtattacttggtgttgcacgaggtaagaaaaaatatgataaacgtcaagctttgaaagaaaaagcagtcaaacgagatgttgcgcgcgatatgaaagcccgttattaagcgatttagttgcttaatcgggctatatttgatatagttatatgtgcttttgtaaattacaaaagtatgatttgtttgatttattatttcggggacgttcatggattcgacaggggtcccccgagctcattaagcgtgtcggagggttgtcttcgtcatcaacacacacagtttataataactggcaaatcaaacaataatttcgcagtagctgcctaatcgcactctgcatcgcctaacagcatttcctatgtgctgttaacgcgattcaaccttaataggatatgctaaacactgccgtttgaagtctgtttagaagaaacttaatcaaactagcatcatgttggttgtttatcacttttcatgatgcgaaacctatcgataaactacacacgtagaaagatgtgtatcaggacctttggacgcgggttcaaatcccgccgtctccatatttgtagcctacagcctttgtggttgtgggcttttttattttgtgtttttcaggggataatgcattgcagaatttgttgtgagtattgatatagcagtgtttgtataggtgtttatttgatggaggaaagagtaataagtgattatgaattagtttttgagatataaggggacagtgatgtgtgtcaaataagtgtcaaaaaagttggattctgagttttacattcaacattgttcatgaagaaacttctttatacgcaaaaaattctccatgttatatatgtcaatataaaaatgtgaatcgtctacacttaattggataaatggctactgaaaaagaacttttcatttttgttacgtcactaagtgggtgtagttataaagagatgagccgagttttgatattttcattagaatcaatatgcctattaacacaatcagcaatagttgacgagacggaaataaaagaagtcgtagttaagaaatgcatttcacaacataccattgtagccatttttattgttttggatgataaactctttttggaatttttagtttttataatttgcaactacactacttcttttactaatattaatgtctaagtaatcgataaaaaattttccattgaataaatgagaagttaaaaactttacttaacctttctcattgcattttcctattcacgattttaagaacccaacatactacaaacgaattttaaaaggcgagagtaaagcttacttgtttattatacatatttaaaatccaagagtcagaacagactactcctctttataactataaaaaatagctatgaaaaaatctatcgtcatagattccttcatagctaatcttagtatgtttatttttattttaggatgctatttatcaactcaacatataactcactatttttataaccttctaatatatcattaacttgtctaataggtatttctggtacttctctaatgttttccaattttgttttaaattgtttttttgttatttgctctttatttgtagccaattggaacaagtaagaatctagcatattaatttctttatatgaatacatatatcttaataacactaaatctctagtttttaagttaggcgctagttcttcttgtaattgttctattgattgtttcattaataacaatctcatttctaattcttcattattcattttatcacactctttttatattaatgcttgaccaacttgggaaacccaaaaccctatgcttcttgcagtagaatctttaataccagttcccatcaatgcttgtgaaacttgaccttgtacatttccccatgtagcctcttcttgttttaatgcattattcaatgcgggatttacaaatttatcccatctttttttatgattttccggcacggggactgatttctttaacaccattaaacacagattttttatttttaatcatagctttatagtatcatgttggctaagctataaataagtcagtttctctaaaaattaaataactgaatgtaagacaatcaacaaaccaaatttatacttcatctaaaccactgtggtcgtcatctttttgcttttctttttctttctctcgttcttgttcttttttgtactcttcttcaaattctttttctttcttttctacttcttctcttgtttccgctctatgagaaaaatcttcggttttaagtttactaaatttgaatgatttagaatcaactgttttatcttctgagtatttatggacatttaaattaatatttccatcacctcttaactcatagataaacatggcttgtgcagttttgccttttttaatttgatcttggttatgttctgtccaatctttatattttttatcacttaaaagataaccatctcttaatttatttactgtatttttatcatcttgagtgatattaatatagtcatgagaaatagaagatggatttaaatctttatcgtcttttttagcagtaatttccattttaaaagcgatatatttctttttctcatctttttcattgatgataaacggttcttttattttagcttcaaatttgtcactaacaatagtatcgcctttaatttttatatccatattttttttgcttttaaattctttaagttcttcatttaattcttcattgtcattttctttctttttgtgactagtgctctctttttttgcactatcttgatgatgtccacaagcacctaagataagtgtacttgctaataatatccccattacttttttcatttaacatgtctcctttatttcgcaaaaatttattttaaaaactctaaatgacttatcattttgagtaattaaacaaagttgatattttgtgagattctaagatgatattaaataattcttgtaataatgatcctatgtattgttgcaataaattaatgaaactataattactaatattatattacttttattgatagaaatatattacttttttaaaaaaacttgtaatatatcgaaagatttaaatgtaaaattttgatttgttaagaaattacgtttgtaaaaataaaaaaatcaacttatttgtatgagataaatatgtattgaagaagacgtgttattaatttggaaaatactggtcaaagatgggagctcttaaaagcgttattgtattttttagtcaatacaaatagattgccgtaataataatcgtacttgatggttaaaaaattacttaaggctataaagcaaaactttttatatgagcagtcgaatataacgtttaaaatgattgtttttggatataaacgattaagtaaaatgctttttcagtttgaaattaatcatataaatttcttatgggagggttgatatcttaatgattaacattatttcagctataggatctattggaacatttattatggctttattttattttgtatcagtttcagttcaactttatcaaatgaaaattagctttctgccagctttaggttttaaccaaattttattagaaagggaggaggatcaacttaatataatgaattcggcaacagaagagcatcatcataaagattatattaaactatataatttaggtggcggtgctgctaaaaaaattgcaatagaggttttattggggaaggataaagtcattcagaaaaaatacgtgcatattttacctagtaaagaagggtacatgttaccaattaataaaaatgtgtacgaagaattagaaagaacgattgagaacaatggtcatgaagctgatttgaatgtacgtatgacttattatcataatgtaagtcgcaaacaacaggaagttatattaaaaggtcaaatcgaccgttttaatacttataataataaagaaatttatgatttgcagtttatctaaaaattgatttaagagggtagttgtttattgcgaaaaatatcattcaattttaatgaaataatggcgtcattactataaaatattactttatgttgtaatgcatttttctataagatagaactaaaaggaggggcaaagatgcaaattagacaaatacatcaacatgactttgctcaagtggaccagttaattagaacggcatttgaaaatagtgaacatggttatggtaatgaatcagagctagtagaccaaattcgtctaagtgatacgtatgacaataccttagaattagtagctgttcttcaaaatgaagttgtagggcacggtttactaagtgaagtttatcttgataacgaggcacaacgggaaattggattagtgttagcacctgtatctgttgatattcatcatcaaaataaaggtattgggaagcgattgattcaagcattagaacgagaagcaatattaaaaggatataattttatcagtgtattaggatggccgacgtattatgccaatctaggatatcaacgcgcaagtatgtacgacatttatccaccatatgatggtataccagacgaagcgtttttaattaaagaattaaaagtgaacagtttagcgggaaaaacaggtaccataaattacacatctgcttttgaaaaaatatgatttcaagctaggattacattaggtagagttcatattaataataaaaaatgtttgcaatcaaatcgtacgttgtcgtttgtaattcttaaaatagcaataaataaaatgtttgttagtaaagtattattgtggataataaaatatcgatacaaattaattgctataatgcaattttagtgtataattccattaacagagattaaatatatctttaaagggtatatagttaatataaaatgactttttaaaaagagggaataaaatgaatatgaagaaaaaagaaaaacacgcaattcggaaaaaatcgattggcgtggcttcagtgcttgtaggtacgttaatcggttttggactactcagcagtaaagaagcagatgcaagtgaaaatagtgttacgcaatctgatagcgcaagtaacgaaagcaaaagtaatgattcaagtagcgttagtgctgcacctaaaacagacgacacaaacgtgagtgatactaaaacatcgtcaaacactaataatggcgaaacgagtgtggcgcaaaatccagcacaacaggaaacgacacaatcatcatcaacaaatgcaactacggaagaaacgccggtaactggtgaagctactactacgacaacgaatcaagctaatacaccggcaacaactcaatcaagcaatacaaatgcggaggaattagtgaatcaaacaagtaatgaaacgacttctaatgatactaatacagtatcatctgtaaattcacctcaaaattctacaaatgcggaaaatgtttcaacaacgcaagatacttcaactgaagcaacaccttcaaacaatgaatcagctccacagagtacagatgcaagtaataaagatgtagttaatcaagcggttaatacaagtgcgcctagaatgagagcatttagtttagcggcagtagctgcagatgcaccggcagctggcacagatattacgaatcagttgacgaatgtgacagttggtattgactctggtacgactgtgtatccgcaccaagcaggttatgtcaaactgaattatggtttttcagtgcctaattctgctgttaaaggtgacacattcaaaataactgtacctaaagaattaaacttaaatggtgtaacttcaactgctaaagtgccaccaattatggctggagatcaagtattggcaaatggtgtaatcgatagtgatggtaatgttatttatacatttacagactatgtaaatactaaagatgatgtaaaagcaactttgaccatgcccgcttatattgaccctgaaaatgttaaaaagacaggtaatgtgacattggctactggcataggtagtacaacagcaaacaaaacagtattagtagattatgaaaaatatggtaagttttataacttatctattaaaggtacaattgaccaaatcgataaaacaaataatacgtatcgtcagacaatttatgtcaatccaagtggagataacgttattgcgccggttttaacaggtaatttaaaaccaaatacggatagtaatgcattaatagatcagcaaaatacaagtattaaagtatataaagtagataatgcagctgatttatctgaaagttactttgtgaatccagaaaactttgaggatgtcactaatagtgtgaatattacattcccaaatccaaatcaatataaagtagagtttaatacgcctgatgatcaaattacaacaccgtatatagtagttgttaatggtcatattgatccgaatagcaaaggtgatttagctttacgttcaactttatatgggtataactcgaatataatttggcgctctatgtcatgggacaacgaagtagcatttaataacggatcaggttctggtgacggtatcgataaaccagttgttcctgaacaacctgatgagcctggtgaaattgaaccaattccagaggattcagattctgacccaggttcagattctggcagcgattctaattcagatagcggttcagattcgggtagtgattctacatcagatagtggttcagattcagcaagtgattcagactcagcgagtgattcagattcagcaagcgattccgactcagcgagcgattccgactcagacaatgactcggattcagatagcgattctgactcagacagtgactcagattcagatagcgattcagattcagatagcgattcagattccgacagtgattccgactcagacagcgattctgactccgacagtgattccgactcagacagcgattcagattccgacagtgattccgactcagatagcgattccgactcagatagcgactcagattcagacagcgattcagattcagacagcgattcagattcagatagcgattcagattccgacagtgactcagattccgacagtgactcggattcagatagcgattcagattccgacagtgactcagattccgacagtgactcagactcagacagtgattcggattcagcgagtgattcggattcagatagtgattccgactccgacagtgactcggattcagatagcgactcagactcggatagcgactcggattcagatagcgattcggactcagatagcgattcagaatcagacagcgattcagaatcagacagcgattcagattcagacagcgactcagacagtgactcagattcagatagtgactcggattcagcgagtgattcagactcaggtagtgactccgattcatcaagtgattccgactcagaaagtgattcaaatagcgattccgagtcaggttctaacaataatgtagttccgcctaattcacctaaaaatggtactaatgcttctaataaaaatgaggctaaagatagtaaagaaccattaccagatacaggttctgaagatgaagcaaatacgtcactaatttggggattattagcatcaataggttcattactacttttcagaagaaaaaaagaaaataaagataagaaataagtaataatgatattaaattaatcatatgattcatgaagaagccaccttaaaaggtggcttttttacttggattttccaaatatattgtttgaatataattaataattaattcatcaacagttaattattttaaaaaggtagatgttatataatttggcttggcgaaaaaatagggggtaaggtaggttgttaattagggaaaattaaggagaaaatacagttgaaaaataaattgctagttttatcattgggagcattatgtgtatcacaaatttgggaaagtaatcgtgcgagtgcagtggtttctggggagaagaatccatatgtatctgagtcgttgaaactgactaataataaaaataaatctagaacagtagaagagtataagaaaagcttggatgatttaatatggtcctttccaaacttagataatgaaagatttgataatcctgaatataaagaagctatgaaaaaatatcaacagagatttatggctgaagatgaggctttgaagaaattttttagtgaagagaaaaaaataaaaaatggaaatactgataatttagattatctaggattatctcatgaaagatatgaaagtgtatttaatactttgaaaaaacaaagtgaggagttcttaaaagaaattgaagatataaaaaaagataaccctgaattgaaagactttaatgaagaggagcaattaaagtgcgacttagaattaaacaaattagaaaatcagatattaatgttaggtaaaacattttatcaaaactatagagatgatgttgaaagtttatatagtaagttagatttaattatgggatataaagatgaagaaagagcaaataaaaaagcagttaacaaaaggatgttagaaaataaaaaagaagacttagaaaccataattgatgaattttttagtgatatagataaaacaagacctaataatattcctgttttagaagatgaaaaacaagaagagaaaaatcataaaaatatggctcaattaaaatctgacactgaagcagcaaaaagtgatgaatcaaaaagaagcaagagaagtaaaagaagtttaaatactcaaaatcacaaacctgcatctcaagaagtttctgaacaacaaaaagctgaatatgataaaagagcagaagaaagaaaagcgagatttttggataatcaaaaaattaagaaaacacctgtagtgtcattagaatatgattttgagcataaacaacgtattgacaacgaaaacgacaagaaacttgtggtttctgcaccaacaaagaaaccaacatcaccgactacatatactgaaacaacgacacaggtaccaatgcctacagttgagcgtcaaactcagcaacaaattatttataatgcaccaaaacaattggctggattaaatggtgaaagtcatgatttcacaacaacgcatcaatcaccaacaacttcaaatcacacgcataataatgttgttgaatttgaagaaacgtctgctttacctggtagaaaatcaggatcactggttggtataagtcaaattgattcttctcatctaactgaacgtgagaagcgtgtaattaagcgtgaacacgttagagaagctcaaaagttagttgataattataaagatacacatagttataaagaccgaataaatgcacaacaaaaagtaaatactttaagtgaaggtcatcaaaaacgttttaataaacaaatcaataaagtatataatggcaaataattaatgcatggctgcaaagcaaataatgagtttgtcgtaaaaataacaacattttaaactagcaataaataatatcaaagtcatcatttcaatgatgcaatctagtatagtccacattctaaacaggtgtggactattacttttttcactttatattacgaaaaaattattatgcttaactatcaatatcaataattaattttaagctgaaaaacaataaaaatgttaagacaacgtttacttcaagttaattattatactgaaaattctggtatataatgctgttagtgaatataacagggaaattatattggttataatattgagtctatataaaggagaaataacagatgaaaaagaaattattagttttaactatgagcacgctatttgctacacaaattatgaattcaaatcacgctaaagcatcagtgacagagagtgttgacaaaaaatttgtagttccagaatcaggaattaataaaattattccagcttacgatgaatttaagaattcgccaaaagtaaatgttagtaatttaactgacaataaaaactttgtagcttctgaagataaattgaataagattgcagattcatcggcagctagtaaaattgtagataaaaactttgtcgtaccagaatcaaagttaggaaacattgtgccagagtacaaagaaatcaataatcgcgtgaatgtagcaacaaacaatccagcttcacaacaagttgataagcattttgttgctaaaggcccagaagtaaatagatttattacgcaaaacaaagtaaaccaccacttcattactacgcaaacccactacaagaaagttattacttcatacaaatcaacacatgtacataaacatgtaaatcatgcaaaggattctattaataaacactttattgttaaaccatcagaatcgcctagatatacacatccatctcaatctttaattatcaagcatcattttgcagttcctggatatcacgcgcataaatttgttacaccagggcatgctagcattaaaattaatcacttttgtgttgtgccacaaataaatagtttcaaggtaattccaccatatggtcacaattcacatcgtatgcatgtaccaagtttccaaaataacacaacagcaacacatcaaaatgctaaagtaaataaagcatatgactataaatacttctattcttataaagtagttaaaggtgtgaagaaatatttctcattttcacaatcaaatggttataaaattgggaaaccatcattaaatatcaaaaatgtaaattatcaatatgctgttccaagttatagccctacacactacgttcctgaatttaagggtagcttaccagcaccacgagtataaaaattggcactaagtttacgagatatgataaatacctattattttaaatatagtctacaatctatgtggttgtaggctgtattttttgcagtttatcaataaacacccatcaacaaattataccgtttttctactttgaaagttggaagtaacataatcttaaataaatatattattaattaagataaatataatactcaagattattgttaatagtttgttcatcgcaagttaattattgtttctaaaatattggtatataattttcaatggcgaagaaaacagggtgaaaaagtcggtttttatatcaaagcaaataagggagcataaacaaatgaaaaggaaagtattagtactaacaatgggtgtaatttgtgcaactcaattatggcattctaatcacgcaaacgcattagtaacagagagtggcgcaaatgatactaagcaatttactgaaattgtatcggaagagaaagttataacagttgaacatgctcaaattaatatttttcaatctaatagcaattcaaacttgatggagttcaacatattaacaatgggcggtaaatcaggagctatggttggttatagtgaaattgactcatcacatttcacagaccgtgacaaacgcgttattagacgtgatcatgttaaagaagcacaaagcttagtagagaactataaagatacacaaagtgctgatgctaggatgaaagccaaacaaaaagttaacacattaagcaaaccgcatcaaaactatttcaataaacaaattgataaggtttataatggattacaacgctaatccaaagtaaattataagttatacatctcgtttttaaatgacaatttatccccgtaaatattataaataatcttttcaaattccacatagatatagagacactaataaacctctttgtctcgatatgatagtctgcaacgattcatgttgtaggctttttaattttacaaataaggctaaatatataagttctggcacctaaaatatagaaaatacataaaagtaagtatagttattttattataattattaaatttttattaattaattgtaaaaatgtagaattataattaattaacgtttaatattaaaattaactaaaaagaaagaggtgttagttatgacagaatacttattaagtgctggcatatgtatggcaatcgtttcaatattacttatagggatggctatcagtaatgtttcgaaagggcaatacgcaaagaggtttttctatttcgctactagttgtttagtgttaactttagttgtagtttcaagtctaagtagctcagcaaatgcatcacaaacagataatggcgtaaatagaagtggttctgaagatccaacagtatatagtgcaacttcaactaaaaaattacataaagaacctgcgacattaattaaagcgattgatggtgatacggttaaattaatgtacaaaggtcaaccaatgacattcagactattattggttgatacacctgaaacaaagcatcctaaaaaaggtgtagagaaatatggtcctgaagcaagtgcatttacgaaaaaaatggtagaaaatgcaaagaaaattgaagtcgagtttgacaaaggtcaaagaactgataaatatggacgtggcttagcgtatatttatgctgatggaaaaatggtaaacgaagctttagttcgtcaaggcttggctaaagttgcttatgtttataaacctaacaatacacatgaacaacttttaagaaaaagtgaagcacaagcaaaaaaagagaaattaaatatttggagcgaagacaacgctgattcaggtcaataatgctcattgtaaaagtgtcactgctgctagtggcacttttataatttttagatcacgatatgatttattatcaattcagaattaaaaaagtaaatagtatcaaaagtaagtgtatttaatattagaaaataaaaattttaaatttagtattaaaatggaatgttactatatagttcaatgtgtattatcacagaaaataaaataatgctttacttctatatttaaaagtgtataatgaaagttaagtaataaagagcgtgaagaaaaatgtgagttatttatatagaatattctccttttcatttatgaatttgttacaaaatatttagtgcaaaagcacgacggaggtattcaatatgaataacggtacagttaaatggtttaatgcagaaaaaggttttggtttcatcgaaagagaagatggtagcgacgtattcgtacacttctcagcaatcgctgaagatggatacaaatcattagaagaaggccaaaaagttgaattcgacatcgttgaaggcgaccgtggcgagcaagctgcaaacgtagttaaaatgtaattttaacttattcaaacagtccttactatagggctgtttttttatgctttaaatcgataacagttggtgtggtaaaagcactagccgttatttttttgtccaataaatttagttggagatttaacaatatataatggttctaaaataaatcgaactgatggaaaagttttttacttttcatctgtccgacttttgattttgaatataaaaaagcgccaatacagaactttaataatgacgagaattaaagtctgtatatggcgataacaagaagtaatgttaaacactcaaaatgtttaacaataataggataccacatcgcataatatcttactacttaattaataatttaactaatcaactttttgttaattttttattaagactgattaattattgagaatatttattgtttttaaaatctcataataattcagtaatcttgttttcatttaaaaggcgaaacattaaaataattaaataaaaatattgcgtttaatttacagcgtcaaatatacttatttctaatgctttggggtctactgaaacaagtaaagaatgatcgatgttactaatattgccattctccaaatttatttctgtgagtatttggaagctaccattaggcaacggtttaacaatagacaattgcttttccgcttgttgtattaaaaaaggttttgtagattgattattaatatgccattcactcatgtatgtttttcactcctgctttaaaatagggttagaaagtttatagttgagacattcatgttcaaccaaaattttgttcgaattcaataaatgtcttgtttaaaatagaaatattgtaaatgttatcgtccaaaacttcaccagttaagtatttgttttgaattaaaatttggcagttagttaagaagtcttgataatcacgatcgcaaaaatagttttcacgtgcatctttagcatcgccaaaaaagttagcgactgtttctgtttctcctttattcgaacgttcaatatataatttgtaaaatttagctattgtatacttttgttctttagttagttcattcaaaatattgggcctcctgaaatatcatttgtaatctatacccaatttattgcaaaacacaaactaatttaactatttgatgaaactgtgttaataagctttaacaagccttagtttgtatggatctataaaattatctttaattgcatagggtgaaataatatgtagtccataacttttaactgatttttcacttacaccaaatttataagcttggtagataattttagtacaatacgtaaattttttgctgttcaaatttaatgtaactagataacgatgatttgtattctcatagtttttcttaacccattcagccgcttttttacctgcaccaggatagctgcaacgataaactttcatccaatcatttttgccacttgcataattatatttaaaagattcgaaggattgtgtagttggtttgtcgccaggcccctcaatttgtaaaatcgttttatcatcaatcgcgatactacaatgaccaaaaaatccccacatgacagggccttttgtaacaataatatcaccaggttgtaattggaatttgtcatcttgaatttctgaatacttattatctgcaattgtttttggtgagtttattggggatacgacaacgaataatataagtaaaattatcgttcgtttaatatagttcacttaaaagctccttgttgaagaaatatatgtaaatagtcttaaattagaattgtaatctttaataagcttgtaagactaaaacatatcttaaatattaaagtatgagagtgtgaaatgtctattaagaataaaaaacagtctgaaacatcattgagacgtttcagactggatataaaatgaatttcatttatagcacaccaaatataaatgtgtatattaatatagcgaatccaaaaatatagagaatgacagtgaaacttaaataggactcttttttagattctttgctagtttttttcattaatacgagtataaacgtagcggcaactaagaaaattaatgctagccaaaacagaattgcaaaatgtaaagacatgtgaaaccctccttatataccgtaattattaacctataaaactataaaaaataggataaatgtaatagagaacgagtacgatatttataaaaaataatatttcacttaaccagtttttagttatcattgcaatggtaaaggatacgatgagtatcacaccacaaatgataataccaggcaggagccaacataaatcatctaaatctttattatatgtgattaaaatattaaagataacaaaagtggtagtaataactatattgatagcatttaacaaaatgttattcatgactgacacctactagtataaaaatagcttcttaataaatatgataacactatttttcaataggtaaataaaaagtatagttatttttaaaatattatttgcagaatgctaaagtttattaattcaaacaagtgagcatatataggggtgtattgtattaatatgaaaagaatatttacatactaaaaactcttaaagttgtataattcgttaatatttttagaatcagatatcaaaaaaatgtgcaaaatcacttttgcacatttacaaatactagttttctgataagattaataataacactttaaatagcgcttaataaatgaagggggcaagtcttatgacgttttacaatttcatcatgggttttcaaaatgataacacaccatttggtatattggccgaacacgttagtgaagataaagcattccctcgattagaagaaagacaccaagtaattagagcatatgtgatgtctaattacacagatcatcaattaattgaaactacaaatagagctattagcttatatatggcaaattaatttgagtagtaccaattatgatgtattagtgcatcccaaatatcttttgttttaaagtttatttcatcatttcttatcgaaaatggtgtaataatgtctttatctaaccaagtgttgataagttcatttggtacaccatctaacaacatttcacttttactaattataaaacattcccagtcaagtgaaacattttgtggattcacataattacattgattatgattatccataaacactcactcctttaaaattctgtactcttcattgcgttttaccccgtcacattatcttttaaactaaaatcatcattacttatgaaaaaaatgtacatcaaaagcaaaggttttcgctaccgaaaaagtttaaataatggtttaatatatttggtactcattttaataaaaagagaatacattttgagctatcaatactttttattgaagaggtgttattgttggctaaaacgttatatataatgcgccacggacaaactttgtttaattttaagggactaattcagggatttggagattcgccgctaacagaacttggaattgctcaagctcaaaaggcacgtagttattatgaaactaaggggataaacttcgatttatatgcatcatcaacgcaagaacgcgcaagtgacacacttgaaaatgttgcacctaaccaatcgtatcaacgttttaagggactgaaggaatggcattttggaatatttgaaggtgagtcagtctatctatttgataatctatacaagcctgaggacttattcggagatcgaattgttcctttcaaaggagaggcaaggcaacaagttgaagaacgcattgtgaaaactttacatgacattatgtctcaaacaaagaataatgcattagtcgtgagtcatggaacaataatgggagtatttttaagatattgccttaaactagatgaagcattaaagcataatatcggtaattgtaatatcctgaaatttgaatatgacaatggaacatttaaatttgttgagttaattgatccaaatttataataaataaagcgttatacatagacacaagtatgtcttttgtataacgcttttaaaatacaactacataacgctttagaataataattgaataagtttttgtaatatcatcagagcaacaataataattattatgcttgatattttattgattattgttaataattttccggttttatcaattgatccaaccatttttcctaaaattgcgagtaaaaagaaccataaccatgaaacgctaatacaagcgattgtaaacgcaattttattgctgccactatataatgcagcactactaccaattactccaattgtatctaaaatagcatgtggattgagtaatgaaactgataaagcaaaacttacttgtttcattggagacataatttgagtttctccatctgttgagggtttatcatgccaaatggtccaagccatatacatcaagaaaattaaaccaactatataaataattgcttgaagtacaggtaaagacataataatgatagatactcctaccactgcaataataataagtaagctgtctgacaacccggctgtaattattgcaggcaatacatatctatattttggttgattagctccttggttaaaaataaatacattttgtgcacctaaaggtaaaattagaccaatcgctaagataaatccatgaataattgcggttaccattaagttttgacacccctaaaacatagaatattctgaaaaaacttattgttatcatatcaaataaaaaacaactactcaatagtagagtagttgtatgaaaaatagaacctatatgatttgaatttatgagaaatgtagaatatataaaactgtattacttattaatcaaatcataaaaaagccaatgttcatcgaaataggtatttccgattttaattgcatttttctcaaaaccaagaatgtcgaatcctagtgcactatagaaaactttagcacctatgttgtttgacacaattgatgtaagtaaagattcgtaattgttctgccgtgcataattaataatgaaattaatgagctcgctattaatcgatttatcgttattagtaacaaagttgtatttaattaatgatttatgttcttttccaacgtatcgaatttgttctaaggcagctgttgcgataagtgtttcgttttcataacagccaaatacaatacatttcggtgaaccttgatttaaaatgtcatgtattaaggtgtcagtcattgtttgactataatgtgaatcttgagtgaattcttcattgactgtcgaaacaagtctcttatactcattaaaatcattattcgttaatgttttaatttcaatcattactgacctccttaatcattattaagaaagattttgtactaaaaaaatttcttaattacatattaaaatgtttattaaaattttgcaatcactgatttatatgcacattcttgtaaatggattatcaatttaattatatttatttttaagttcaggaaattatggaattggttattggtcgacactggacttttatttgtagacggtatgcgaagaagtaaagccagtattggaaccggtcacatttatgatgactaaggtacaatcattttcagttaaatattgccagaaatttcaatcacgaatagaaaaaataaccaaccaaaaatttttggttggcaaatttgaattttatgtgaattttattaataacgttgaataatctctttaagttaatgctaatctacaacatttacatttaaatcgacattaatatttccttgagtcgcttttgaatatggacaaaattcatgagccatttgtaaatatttttcagcttcttcttgagatataacatttttaattgtcgcatcaattgaaacacttaatttaggactttctgagtctgaatcatcttctagtctcactgttagtgttacttctggatgagcatcacgcactttgttttgctttaaaattaggtcgaaagcaccgttgaagcaagatgcataacctgctgcaaataattgttcggggttagtagctttaccatctgcttgagcaggcggaacgatatcaatatctaatgctcgatcatcagtataaacatgtcctttacgtccgccaacattcgtcgctttagtttcataatgtattgccatacttataacctcctaatttaaaatacatttatgctttacccattcgaaaataccttaatcattttcatttatagcattgtttgattgaaggataaaaagttgttgtttacaataaaaataatgagtatctgaaatgagggattcactatgacacatgtggaagtagtagcgactatcgcgccacaattatctatcgaagaaactttaattcaaaaaattaatcatcgtattgatgcaatagacgtattagaattacgaattgatcaaattgaaaatgtcacagttgatcaagtggcagaaatgattacaaagctgaaggttatgcaagattcattcaaattattagttacgtatcgtacaaagttacaaggtggctatgggcaatttacaaatgactcgtatcttaatttaatatcagacttagcaaatatcaatggcatagatatgattgatatagaatggcaagcagatattgacattgaaaaacatcaacgaatcattacacatttgcaacagtataataaagaggtggttatatcacatcataatttcgaaagtacgcctccattagatgaattgcaatttatattttttaaaatgcaaaaattcaacccagaatacgttaaattagcagtaatgccacataataaaaatgatgtgttaaatttattgcaggcaatgtctacattttcagatactatggactgcaaagttgttggtatttcaatgtctaaacttggactaataagtagaacggctcaaggcgtttttggtggtgcgttgacttatggttgtatcggagtaccacaagctccaggacagattgatgttactgatttaaaagcacaagtgactttatactaataaaatgaattaggttgcttttgtgtaagtgctgtcttataattgagaagtattatcattgttcgtggaggagcgattttagatggaattacaacaagcaatagctaatagaagaagtgtgaaaaaatttaaaagagatatgcacatagatgacgcattgctatatcaagcaattgagaaagctgctgatgctccaaatcacggaatgagggaaccatggagagttgtgcatgttccgaaagacagattaggagatatgagtaaggatatttctaaatttgcatttcctaatgaattagataagcaacaatgtcattatgatgcagttacgaaactaggtggcatgttattgcttattttaaaaacagatccaagacaacgtcaaaatgatgaaaactactttgcatttggtgcatatgcacaaaatcttatgttgttactttatgaagcgggaataggtacatgttggaaatcgccattatatatctatgatcctaaagtaagaaaaacacttggtataaagaaagatgaagttcttgctggattcttatatttaacggatttagaaggagatatgcctaaagcaccacgtaaaaatagaaacttaattacattatattaatatgtataattatagaaacattaataaaagctgagtcatgaattgatggacatctatcgagttagagatttaatctaacttactagagtcggtacaataacagtctcagctttttattgtgcagtatatacacatttttattttagtatttatttaaaagtttctgctaaaaatgattcaacttgttcaggtgacttagcatttgctgaatgaaggtgtgcaattttatcgccgtttttaaatactagcaagctagggatacccataacttcattttcaacaactacatcttctaattcatcacgattaacagtataccattggtaatcattatattgttctacgattgggtcaatccataaatccatagcacgacagtctgggcaccatcctgcctcaaatttaacaattacaggtgtatcgctattaattacagatttaaatgattcattacttttgattgattgcattgtaacaactcctctagatagtttaataatttttattatagctaaatttatatcataataaaaaattttagcttcaaaatgaaagccttttgctttggaaaatgatatatttattttaaatacataaaggaggttgcagtcgtatgattaaattttaccaatataagaattgtacaacttgtaaaaaggcagcaaagtttttagatgaatatggcgtaagttatgaaccaattgatatcgttcaacatacacctacaataaatgaatttaaaacaataattgcaaatacaggcgtagaaattaataaattgtttaatacacacggcgcgaaatatcgtgagcttgatttgaaaaataaattacaaactttatcagatgatgaaaagttagagttgttatcatctgatggtatgttagtaaagcgtcctctagcagtaatgggcgataagataacattaggatttaaagaagatcaatataaagagacttggttagcgtaagtgaaatgtaagcgtttactaaatatctcgatatttagattcattacatgtaaaatgaaataagctatacaattgttaatttttataaatatagttgaatagcatctagccttatggcatcattaatgatgtaaagattaattaggaggggattctcttggcagtaccaaatgaattgaaatattcaaaagagcatgaatgggttaaagttgaaggtaatgtagcaataattggaatcacagaatacgcacaaagcgagttaggtgatattgttttcgttgaattaccagaaacagatgatgaaattaatgaaggggatacgtttggtagcgtagaatcagttaaaactgtatcagaattatatgcaccaatctctggtaaagtagttgaagtcaacgaagaactagaagatagtcccgaatttgtaaatgaatctccatacgaaaaagcatggatggtaaaagtagaaattagtgatgaaagtcagattgaagctttattaacagctgaaaaatattcagaaatgattggtgaataatcaccgtgtaactccttaatctaagattgaggagtttatttttagtctgagaaaataaatgatatgaaagaaaaattattaggtactattatttggagtattgctacattttattattcaagaatgatggaaataatgaatttagctattttaaaaataaaaattgggggaagttaatatgctaaacattcaagacgttagtcatctttctaaaaaggagcaaaaagcatataaccgtttcgtagaatctgtagaaaacggtaatttaccagtactaccatgtattgaaatggatctaaaagagatgcaagaagaaacattaaaccagagtaagattggtggaatgccatttttaaaatcttttaaagatataccattagatgaaaataatgtaccaatggtattgctagcacagattaatttggatgatcttccagaacaacaagaattatttcctgtaaaagaagggatattgcagttttggattagttcagaagatcaaatgtatggaatgtctgaaaatttaaagggaaacaatataaactcaaggcttgtttatataaaagagccaattacagatttatcactcgaaaatattcaagcgcatttgaagtcattagatgctgataatgaggatatcccgttcagtggagcattttctatagaatttagattgtcgaaacaaactattacatgtactgattataagtacgatgaggacgtgcttgcattgtggaataaagtcaatccatccttcgcgctaaaatcaatgtttggtggttatgatgaattgatggaacctgtgtgtaacacatttactgctaaggaaccatttaatcaacttggtggttatccatattttgaccaaatagatccaagaacgaacgatcaagaactggaaatgtatgatagagtcttactgcaaattgattctacaagagatggtaattcttcgattatatggggtgatttaggtattgccaatatcttagtgaaatctactgaccttgaggctatgaagtttgatgattacatgtattcatgggattgcagctaagagaatcataaaaatatattactttaataagtgtagtatctatagatcaatctagggagtgggacataaatgatattttcgcaaaatttatttcgtcgtcccaccccaacttgcattgtctgtagaaattgggaatccaatttctctttgttggggcccatccccaacttgcattgcctgtagaatttcttttcgaaattctctgtgttggggcccctgactagaattgaaaaaagcttgttacaagcgcattttcgttcagtcaactactgccaatataacttcgtagagcatagaacattgatttatgtcccagcctgttttcataagccacagctaatgtgtatttaaaaataggaatacatgagtaaaactcatgcataagaaatactaatttctaaagaaaaagtatttctttatgttggggccccgccaacttgcacattattgtaagctgacttaccatcagcttctgtgttggggccccgctataattgaaaagtttgttataggtgtattttcttttggttaactattgttaatataacattgtagattttaggatgttgatttttgacttagcctttgtctgcttatgttaaatgttccagctagtcaaacattgagtttgtaattattatattaagctagtttaaattttttgtgatttatgttttattcataccaattttgtgaaatgatacagtgacagatgtttattgattttaaagggtgatgatgatggctattgtaaataaagtgataattgttgaaggaaaatctgataaaaaaagggtgcaacaggttattgcagaaccagtcaatattatttgtactcatggaacaatgagtatagataagcttgatgatatgatagaatcactgtatgataaacaagtttttgtattagccgattctgatgacgaaggagatcgaattagaaattggtttaaacgttatttgagtgaaagtgaacatatatttattgataaaacttactgtcaagttgcgaattgccccaaacaatatttggcgcatgtactttcaaaacatggctttacttgtaagaaagaaacacctcttttaccgaatataaataatgaaaggttagttttagtaaatgaataattcattagacatcaaagatgtaactacattttatgaggaagacaaacatttaatctttggttatacaccaacgtgtggtacttgtaaggtttcagaaagaatgttagacattgctaatgaaatattgcagttaccattattgaaaatagatttaaacttttatcctcagttttgtaaagatatgcaaatcatgtctacgccgattttattgttgatgaataaagataaagaagtaaaacgaatttatgcatttaaatcggtgactgatttgttagaaaatttaaaatagttattgacgaaattttactaaggtgttaggattaatacaaattaaatgatgcgtaaactcttatcgagagtggtggagggatgtgccctacgaagcccggcaaccgtcttatatagaaatggtgccaattcacataaagttttaacttttgaagatgagagaaacaatactactattgctttctcaatttttctatcgatattgagaaagcattttttattttattaagcaacacagggaggaatcaacgtgattgaattaaaagaagttgttaaagaatatcggactaaaaataaagaagtccttgctgtagatcacgttaatttatcgattcgagcaggatcgatttatggcgtcattggtttttctggagcaggaaaaagtactttgattcgaatgtttaatcatttagaagcgcctacatcaggtgaagttattatagatggagaccatataggtcaattgtccaaaaatggattaagagcaaaaagacaaaaagtaagtatgatcttccaacattttaatttgttatggtcaaggactgtgttaaaaaatattatgtttccgcttgaaattgcaggtgtccctagaaggagagctaagcaaaaagcattagaacttgtcgaactcgtcggtttaaaaggtagagaaaaggcttatccatcagagttatcaggtggacaaaagcaacgtgttgggattgcacgagcgttagctaatgatccaacggtcttgctttgtgatgaggcaacaagtgcacttgatccgcaaacaacagatgaaattttagatctactactaaaaattagagaacaacaaaatttaacaattgtactaattacgcatgaaatgcatgtcattcgtcgtatttgtgatgaagttgcagttatggaaagtggtaaagtgatagaacaaggaccggtgacacaggtttttgaaaatccgcaacacactgtgacaaaacgatttgtgaaagacgatttaaatgatgatttcgaaacatctttaacagaattagagccattagaaaaagatgcatatatcgttagattagttttcgctggttcaacaacaaccgagcctattgtatcgagtctatcaactgcctatgatattaaaattaatattttagaagcaaatattaaaaatacaaaaaatggaacagtcggctttttagttctgcatattccatatatttcaagtgtagatttcggaaaattcgaaaaagagttaattgagcgacaagttaaaatggaggtgttaagacatgggtaaatcatttagtgaaattataaatgaaatgattacaatgcctaatattcagtggccagaagtttggactgcaatagtcgaaacactatacatgacagtcgtctcaactatatttgcatttatacttggtcttattttaggtgtgttattattcttgtctgctaaaggtaagtctatcggtgcaaggttattttattctatcgtttctttcattgttaacttatttagagcgataccatttattattttaattttattattaattccatttacaagtttgatacttggaacgataagtggtccgacaggtgcgttaccagccttgatcattggcgcagcaccgttttatgcaaggctcgtagaaattgcttttaaagaaattgataaaggtgtcatcgaagcggcttggtcaatgggcgctaatacttggacagtaattcgtaaagtccttttacctgaagctatgccagcgctagtgtctggcattacagttacagcaatcgctttagttggttcaacagcagttgcaggtgtaattggtgccggtggtttaggaaatttagcatacttaacaggtttcactcgaaatcaaaatgatgtcattttagtatcaacagtttttattttaattattgtatttataatccaattcattggggattggcttacaaataaacttgataaacgataaattgggggtttcattttatgaaaaaattatttggtcttattttagtattaacatttgcagttgtattagcagcttgcggtaatggaaacaaaagtggcagtgacgacaagaaaataacagtaggtgcttcaccagcaccacatgctgaaattttagaaaaagcaaaaccattattagagaaaaaaggttatgaactagatattaaaacaattaacgattacactacacctaataaattactagacaaaggtgaaattgacgcaaactatttccaacatacaccatatttaaacacagagaaaaaggataaaggttacaaaatcgtaagtgccggtgatgttcacttagaacctatggctgtatactctaaaaagtataaaagtttaaaagaattaccaaaaggtgcaacagtctatgtgtctaataatccagctgaacaaggacgtttcttaaaattcttcgttgatgcaggtttaattaaaatcaaaaaaggcgtaaaaattgaagatgctaagtttagtgatattacagagaataaaaaagatattaagtttaataataaacaatcagcagaattcttacctaaaatttatcaaaatgaagacgctgatgctgttatcattaattcgaactttgcaatcgaacaaaaactaaatcctaaaaaagattctattgctgtagaaagtgcgaaagataatccttatgcaaacttaattgctgttaaagaaggacatcaagatgataagaaaatcaaagcattaattgaagtattacaatctaaagatattcaagacttcattaatgaaaaatacaatggtgcagttattcctgctaaataaatcattttaatggctcagtaacgtgatgttgctgggctttttaatttaaacaggtatttatatgatatttaggaatgagatgctattacggataaagtaaaatcctatatgcatgcgtgctactcatttattcttatttttaatttcacatggctagtgactaatacatcataaatcattagtgattctttattatttcagtcccactccctcaagttaatgatgaatctatttcgctagttataaaatgacgtcaaatcaatatcaaaaattatttaagtaaaatgtttagataatttttcagtgggtaagtattatatataacatttaattattccgaggaggcatttattatggcagacgaaagtaaatttgaacaagcaaaaggtaatgttaaagaaacagtaggtaatgttactgataataaaaatttagaaaacgaaggtaaagaagataaagcttctggtaaagcgaaagaattcgttgaaaatgcaaaagaaaaagcaactgattttattgataaagtaaaaggtaacaaaggcgagtaattttactttttattcctaatacactgcacatgccacttagtcggtataaccatcggctaggtggtttttgtattaaaaaagtggataccaaaatttattaataattattttaatgttagaaaaaaactaaataaaaactcgctaatgatatccaataatatgtatacaaaacgagacatatattgcatatgattaacgagatactgaaaatattttatcacccctaaaatgattattcattttcagcggtaattcgacctaaagtcaaacttacaataaaaccgatgataaatactactaatgaaacgaaccacatcacgatattagttggtaaacctggaaatactgcaaagagggagccaacaacaaaaccaatgattaatgcaaaagtcattagtttatgatgtgttaggaaatactggataattttgcttgaaataatgaatccagcaagcacgccaaatccgactgcaagtaatataggaagacctgcaaagttaagtttaacaacttcagatattgctagcatgaccgtaccatagacgccaaatactaataacataaatgaccctgaaatacctgggagtaacatagcactagatgcacacatacctgcaataaaatatttaataataagactagttgatagagtaagtgtttctccagcatgtttatcaccattattcattaatgtaataacaattaagatagcgataccagctataaccatcatgtaatgtttagttgtaaatgacgttttatagttagaaattttcaataaatatggaacgataccaatgattaatccaccaaagaaaaacatagttggaatatggtgttggcttaataaataattaaaaagattacttagtgatcccattgccagtaacattccaattataatggggattaaaaatgtaaaacttggccaaaaacgtcgtgagaatatgccgctaattgaagcgataaattgattgtaaatacctaacaataatgcgatagtcccaccgctaacaccaggtaccaagtcactcgttcccatagcaaaaccttttagaatattaatccatttaaattgttgcatgaataactcctttcaaacgattggaataaaatcataaatagcatcataccatattacaaatgccctagtgaaatgataacatattttaaattcataaaatccattgagaaattatgtgcacttattatcatttatatttttaaagagagcggattagagttgtactttagagttattaaaaataataaaaagggtttaagttgtttatattaaggtataagtaagttataattaactgaacgcattattacaaagtctttttgactacaaattaaaattattataaactagttaagaaaactttatattttacggagggaatataaaatggcatcaacattagaaatcaaagacctacatgtgtctattgaggataaagaaatcttaaaaggtgttaacttgacaattaacactgatgaaatacatgcgattatgggaccaaacgggacaggtaaatcaactttatcatctgcaattatgggacacccaagctatgaagtaactaaaggagaagtacttttagacggtgtaaatattttagaattagaagttgatgaaagagcaaaagcaggattattcttggcaatgcaatatccatcagaaattacaggtgttacaaatgctgatttcatgcgttcagcaatcaatgcgaaacgtgaagaaggacaagaaatcaacttaatgcaatttattaagaaattagataaaaacatggattttctagacatagataaagacatggcacaacgttatttaaatgaaggtttctcaggtggagagaagaaacgtaacgaaatcttacaattaatgatgttagaacctaagtttgcaatcttagatgaaatcgattcagggttagacatcgatgcattaaaagttgtatctaaaggtattaaccaaatgcgtggggaaaactttggtgcattaatgattacacactatcaacgattattaaattacattactcctgataaagtacatgtaatgtatgctggtaaagtcgttaaatctggtggtccagaattagcaaaacgtcttgaagaagaaggatatgaatgggttaaagaagagttcggttcagctgaataatcttattaatacagtatccatgagatgttcatctatatatgatgaaaatgaacatttatacgaaatagtaaatttcatcaagtaggaggaaaaagttatgacaactgatattttgaacatttctgaagaacaacttgttgattattctaaagcccacaatgaaccttcttggatgacagaattacgtaaaaaagctttgaaattaacagaaactttagaaatgccaaaacctgataaaacaaaattaagaaaatgggattttgattcttttaaacaacacgatgtaaaaggtgatgtttatcaatctttatcacaattacctgagtcagtaagagaaattattgacgtagatcattctaaaaacttagtaattcaacataataatacgattgcgtacacacaagttgatgataatgcatcgaaagatggcgttatcgttgaaggtttagcagacgctcttatgaaccatagtgatttagtacaaaagtactttatgaaagatgcagtaacagtagatgaacatcgtatcacagcgctacacacggcattagttaatggtggcgtatttgtttatgttcctaaaaatgtagttgtagaacatccagtacaatacgttgtgttgcacgacgacgaaaatgcaagcttttataaccatgttatcatcgttactgaagaaagcgccgaagtcacatatgttgaaaattacttatcaaatgcatctggtgaaggaaatcaattaaatattatttctgaagtgattgctggtgcaaattcaaatatcacatatggctcagtggactatatggataaaggctttacaggtcatatcattcgacgtggtattactgaagcggatgcctcaattaattgggcactaggtttaatgaatgagggtagccaaattattgataatacaacaaatttatttggtgatcgttcaacaagttcacttaaatcagtagttgtaggtacaggcgaacaaaaaattaatctaacatctaaaatcgtacaatatggtaaagaaacagatggttatatccttaaacatggtgttatgaaagaacatgcatcgtctgtatttaatggtatcggctacattaagcatggtggaactaaatcaattgctaatcaggaatcacgtgtattaatgttatctgaacatgctcgtggtgacgcgaatcctattttattaattgatgaagatgatgtacaagctggtcatgctgcatcagtaggtcgtgttgatccagatcaactttactatttaatgagtcgtggtatttctcaaagagaagcggaacgtcttgttatacatggtttcttagatccagtagtacgtgaattacctatcgaagacgttaaacgtcaattgagagaagtaattgaacgcaaagtttctaaataatattttgaaaataaaagtttgtaatagatatagactgtcgatattggtataagactaatacaacgtcagtatttaaatgattaggatttttatttaagaaaggtcgtgaatgaagtggccgaacactcatttgacgttaatgaagtaatcaaggattttccgatattagatcaaaaagtcaatggcaaacgtttagcatatcttgattcaacagcgacaagtcaaacgcctgtgcaagtgttaaatgttttagaagattactacaagcgttataattcaaacgttcatcgtggtgttcatacattaggattattggcaactgatggttatgaaaatgcccgtgaaaccgttcgtcgttttattaatgcgaagtattttgaagaaatcatttttacacgcggaacaactgcgtcgattaaccttgtagcacatagctatggtgatgcaaatgttgaagagggcgatgaaattgttgtcactgaaatggaacatcatgccaatattgttccttggcaacagttagcaaagcgtaaaaatgcgacattgaaatttataccaatgacagctgacggtgaattaaacatcgaggatattaagcaaacgattaatgataaaacaaagatcgttgctattgcacatatatctaatgtgctcggtacaattaatgatgttaaaaccattgcagaaatagctcatcaacatggtgcaattatcagtgttgatggggcgcaagcagcaccacatatgaaacttgatatgcaagaaatgaatgctgatttttatagttttagtggtcataaaatgcttggaccaacaggtattggcgtattatttggtaaacgtgagttactacaaaaaatggaaccgattgagttcggtggcgacatgattgattttgtaagtaagtatgatgcaacatgggctgatttacctactaaatttgaggcgggtactccattaattgctcaagcaattgggcttgcagaagctattcgctatttagaacgcataggttttgatgcaattcataaatatgaacaagaattaacgatatatgcttatgagcaaatgtctgcaattgaaggaattgaaatttatggcccgccaaaggatcgtcgtgcaggtgtaataacgtttaatttacaagatgtacatccacacgatgttgctacagccgtagatacagaaggtgtagcggttagagctgggcatcattgtgcgcaaccgttaatgaaatggttaaatgtgtcttcaacagctagagcgagtttttatatatacaacacgaaagaagacgttgatcagttaataaatgccttgaaacaaacgaaggagtttttctcttatgaattttaataatctagatcaattatatagatctgtcattatggatcattataaaaatcctagaaataaaggtgtattagataacgggtctatgacagtagatatgaataacccgacatgcggtgaccgtatacgactaacatttgatatagaagacggcattataaaagatgctaagtttgaaggtgaaggttgttcgatttcaatggcaagtgcatcgatgatgacacaagctgttaaaggtcattcacttggagaagcaatgcaaatgagccaagaatttacgaaaatgatgcttggtgaagactatgtgattacagaagaaatgggagatattgaagcattgcaaggtgtatctcaattcccagctcgtattaaatgtgccacattagcttggaaagcattggaaaaaggtactgttgctaaagaaggtacgactgaagaagaatagaatgctgttaatcatagataattttgatattagacatataaaagtataaaaatttttataagatgtcatgtcattgttataatatggtttacatcatgaattaaaaacttacgcacgccgttgtaaatatatttttaaggagtgattgaaatggctaaaaaagcacctgatgttggggattataaatatggattccacgacgatgatgtgtccattttcagatcagaacgtggtttaactgagaatatcgttagagaaatttctaacatgaaaaatgagccggaatggatgttagatttccgtcttaaatcattaaaattgttttataaaatgccaatgcctcaatggggtggcgacttatcagaattgaatttcgatgacattacttactatgtaaagccttcagaacaagctgaacgttcatgggatgaagtgccagaagaaattaaaagaactttcgataaattaggaattcctgaagctgaacaaaaatatttagctggtgtttctgctcaatatgaatctgaagttgtttaccataatatggaaaaagaacttgaagaaaaaggtattatctttaaagatacagatagtgctttacaagaaaatgaagaattattcaaaaaatactttgcttctgtagtacctgcagcagataacaaatttgcggcgttaaactcagcagtatggtcaggtggttcgttcatttatgtacctaaaaatatcaaactagatacgccactacaagcttatttccgtattaactctgagaacatgggtcaatttgaacgtacattaatcattgctgatgaaggtgcttctgtacattacgtagaaggttgtactgcaccagtttatacaactagttctttacactctgctgttgtggaaatcattgtgcataaagatgcgcacgttcgttatactacgattcaaaactgggcgaacaatgtatacaatttagttacaaaacgtacttttgtttatgaaaacggaaatatggaatgggtagatggtaacttaggttctaagttaacgatgaaatatccaaactgtgttcttttaggtgaaggtgcaaaaggtagtacattatctattgcatttgctggtaaaggacaagttcaagatgccggtgctaaaatgattcataaagcacctaatacatcttctacaattgtttctaaatctatttctaaaaatggtggtaaagttatttatcgcggtattgttcattttggacgtaaagcaaaaggtgctcgttcaaatattgaatgtgatacattaatcttagataacgaatcaacatcagatacaattccatataacgaagtattcaacgatcaaatatcattagaacatgaagccaaggtttcaaaagtttctgaagaacaattattctatctaatgagtcgtggtatttctgaagaagaagcgacagaaatgattgttatgggattcatcgaaccatttacaaaagaacttccaatggaatacgcggtcgaaatgaaccgtttaatcaagttcgaaatggaaggtagtattggatagctttaaaccgcgttgttaagccattcttgacttccgaaaatggctattgataccattttgatactgaatataacaaaaagccacattactgtggctttttttgttttataactaaatcggattgatagataagctttgtacttatttatatcagttcgattttttgattggtgtaaaaaataatcattgatggtggataaagcgacaacacaaatacaacatgattgtggcattagagtgctggtctttattaaattaattgaaagctacatcaaatattctttagataattcgatattagttcgattaagattcgttgtataagtgagttaaaataagaaaactattaataatattaagttcactacagatgttgctaatggaccataagttttaaagacatcttcacttttataaccaacaatcgcatctaaaaattgaactaagatcattgcaatggatatagttatcaaaaatatagcactatgaatgactaaagaaaaaatagctaataaaaataaaggtaagcttcgactaagtgcataatatgcatttatattatggctagatgcacatgcttgaattgaataacctaaacttacactggcactgattattgtaaatattgctaaaacaaaatacatgttaatccttctttctatatttggatataaacaagtacttgtctaaagttatttaaaagataattagaataaatttatgagaaactggttgttatcattataatggtttcaaatgattataactatgtcataaactgaatttgttgaaatttttcattatgcaaatttattaataacaaacagctcgaactatagcatcattttactaatgaatgcattaaagtaactatgactaaaaatgcatattaattatcattattaagactattatatataatgaattttaactggtttattaaacgagaacgtcgggaattaagtaactacaataaaaataagatatgacaataaggagactacacgcgtgatcattgccataattatattgatatttatttcgtttttcttttcaggaagcgagacggcattaacggctgccaataaaacaaaatttaaaactgaagctgacaaaggtgataaaaaagcaaaaggcattgtaaagttacttgaaaaaccaagtgagtttattacaacgattctaattgggaataatgtcgcgaatattttattaccaacacttgttacaattatggctttacgttgggggattagcgttggtattgcatcagctgttttaacagttgttatcattttgatctccgaagtgattcccaagtctgtcgctgcaacatttccagataaaataacaaggcttgtatatccaattattaatatttgtgtcattgtgttccgtcctatcacattacttttaaataagttgacggacagtattaatcgaagtttatctaagggccaacctcaagaacatcaattttcaaaagaagaatttaaaacaatgttagcaattgctggacatgaaggtgctttaaatgaaattgagacgagtaggttggaaggtgtcattaattttgaaaatttaaaagtaaaagatgtagatacaacacctagaattaatgtgacggcatttgcttcaaatgcgacatacgaagaagtttatgaaacggttatgaataagccatacactagatatccagtgtacgagggagatattgataacattattggggtgtttcattctaaatatctgttggcttggagtaataaaaaagaaaatcaaattacaaactattcagctaagccattatttgtgaatgaacacaataaagctgaatgggtattacgtaagatgactatttctagaaaacatttagcaattgtgttggacgaatttggtggtactgaagcgatagtgtcacatgaagacttaattgaagaattattaggtatggaaattgaagatgagatggataaaaaggaaaaagaaaaactttctcaacagcaaattcaatttcaacaacggaaaaatcgcaacgtatctatataaggagcgaacagctatgtggaataagaatcgacttactcaaatgttaagtattgaatatccaattatacaagcaggtatggcaggaagtacgacaccgaaattagttgcatcagtaagtaacagtggtgggttaggcacaataggcgcaggttactttaatacgcagcaattggaagatgaaatagattatgtacgccaattaacgtcaaattcttttggcgtaaatgtctttgtaccaagtcaacaatcatataccagtagtcaaattgaaaatatgaatgcatggttaaaaccttatcgacgcgcattacatttagaagagccggttgtaaaaattaccgaagaacaacaatttaagtgtcatattgatacgataattaaaaagcaagtgcctgtatgttgttttacttttggaattccaagcgaacagattataagcaggttgaaagcagcgaatgtcaaacttataggtacagcaacaagtgttgatgaagctattgcgaatgaaaaagcgggtatggatgctatcgttgctcaaggtagtgaagcaggtggacatcgtggttcatttttaaaacctaaaaatcaattacctatggttggaacaatatctttagtgccacaaattgtagatgtcgtttcaattccggtcattgccgctggtggaattatggatggtagaggagttttggcaagtattgtcttaggtgcagaaggggtacaaatgggcaccgcatttttaacatcacaagacagtaatgcatcagaactactgcgagatgcaattataaatagtaaagaaacagatacagtcattacaaaagcgtttagtggaaagcttgcacgcggtatcaacaataggtttatcgaagaaatgtcccaatacgaaggcgatatcccagattatccaatacaaaatgagctaacaagtagcataagaaaagccgcagcaaacatcggcgacaaagagttaatacatatgtggagtggacaaagcccgcgactagcaacaacgcatcccgccaacaccatcatgtccaatataatcaatcaaattaatcaaatcatgcaatataaataatcgaccgcaatccacaaaagcacaagcacccccaaacattattttagtgcttgccatttttgtggattgcgtttctattttaccaatttaatcaaacgaaaacatcaagctgaagatcgccgaaagattttaatcaagcaaaaacatcaaactaaagttcgctgaaatgattatgataaaagttatatggtatgatgacattggtgatatatatgataaacatcggattaacaggttggggtgatcactattcattatatgaagatttagaacgccaaaccgataaacttaaaacatatgctggacattttccggttgtcgaattagatgcgacatactatgcgatacaaccggaaagaaatatattgaaatggataaaagaaacgcctgatacatttgaatttgtggtcaaaattcatcaagcactcacattgcatgcagactacaaaacatttgcagatacaaggcaagaactatttgatcaatttaagaatatgttagagcccttacatacacagaaaaaattagcaatggtattggttcaatttccgccatggtttgactgcaatgcacaaaatatcaaatatattttgtatgtaagacagcaattacaagcatttccaatgtgtgtagaatttaggcatcaatcatggtttagtgatgcatttaaagaacaaacattggcatttttaacagaacatcaaatcattcatgcagtagttgatgaaccacaagtgaaagatggcagtgtacctttagtcaatcgaatcacaaatgaaattgcgtttgtacgttatcatggacgtaatcattacggttggactaagaaagatatgtcagatcaagaatggcgcgatgtacgctatttatatgattataatgagcaagaattaatagacttggcacaaaaggcacaaatattagcacaaaaagctaagaaagtttacgtcatatttaacaataattctggtggtcatgcagcaaataatgccaaaacatatcagcgattattgaatatagaatatgaagggttagcaccacaacaattaaaattattttaagaggcgacgactatgttattaacaattacattattagttttaatcggaggtttgtcagcgattatagggtctatcgtaggcattggaggcggtattattatcgttccaacaatggtttacctcggtgttgaacatggattaatacataatattacaacacaagtagcgatagggacgtcttcagtcattctaattgtgacaggactttcttcatcacttggatatttaaaaacaaaacaagttgatattaaaaatggttccatctttttatttggactattaccaggttcattgcttgggtccttcattagtagatatttaacatttgagtcatttaatttatattttggtatctttttaattttcgtagccattttattaatggtaagaaataagattaaaccgtttaaaattttcgataaacccaagtatgaaaagacttatgtagacgctaaaggtaaaacatatcattatagtgttccaccattgtttgcttttattacaacgtttttaattggtatattgacaggtttatttggtattggaggtggcgcactaatgacgccactaatgcttattgtatttagatttccacctcatgtagctgttggaacaagtatgatgatgattttcttttcaagtgtcatgagttctatagggcacattgctcaaggtcacgtagcttggggttatgcaatcattttaattatttctagttattttggtgcgaaaatcggtgtcaaagtgaatcaatcaattaagtcagatacggtagtaacattattgagaacagtaatgttgttaatgggtatatatttaattattcgtgcgttgatttaatacaactttaaaaggaggacgtcaatttgaggcttacaatttatcatacgaacgatattcatagtcatttacatgaatacgaacgcattaaagcatatatggcagaacatcggccacgacttaatcatccttctttatatgttgatctaggtgatcatgtagatttatccgcacctataactgaagcaactttaggtaaaaagaatgtggcattactaaatgaagcaaaatgtgatgttgcaacaatcggtaataatgaagggatgaccatttcacacgaagctttaaatcacctttacgacgaagcaaaatttatagtgacatgtagcaatgttatagatgaatcaggtcatttaccaaataatatcgtttcttcttatattaaggacatagacggtgtgaaaatactattcgttgcagcgacagcaccttttaccccattttatcgtgcactaaattggattgttaccgatccacttgaatctataaaagaagaaattgaacttcaacgaggtaaatttgatgtattaatcgtgctaagtcattgtggcattttcttcgatgaaacattatgccaagaattgcctgaaattgatgtcatttttggtagtcatacgcatcattattttgaacatggtgaaatcaataatggtgtactgatggcggcagctggaaagtatggtaattatcttggagaggttaatttaacttttgaggcacataaagtagtacataaaactgcaaagattattcctttagaaacattacctgaagttgaaacttcatttgaagaagaaggaaaaacgttaatgtccaattcagtaattcaacatccagtagtgcttaagcgtagtatgaatcacataactgaagctgcatacttattagctcaaagtgtttgtgagtatacacatgcacaatgtgccatcatcaatgctggcttactcgttaaagatattgtaaaagatgaagtgacagaatatgacattcatcaaatgttaccgcatccgattaatatggtaagggttagactttttggtgtgaaattaaaagagattatagctaaaagtaataaacaagaatatatgtatgaacatgcacaaggtttgggtttcagagggaatatatttggaggatatattctttataatttagggtacattcattctacagggcgttactatctgaatggagaagaaatcgaagacgacaaagaatatgtactaggtacgatagatatgtatacgttcggtcgttatttcccaacattgaaagaattaccaaaagagtatttaatgccagagtttttaagagatatatttaaagaaaaattattggaatattaaaaagtaagattattggattttcatttgtcatgaatttcgatataatgtttaaagatacacttaacaggagggtatgtgttgttatggcgacaaaaaacgaggaaatattacgtaaaccggattggttgaaaataaaattaaataccaacgaaaactatacaggacttaagaagatgatgagggaaaaaaatcttaatactgtatgtgaagaagctaaatgtcctaatatacatgaatgttggggtgcacgtcgtacagcgacatttatgattttaggtgccgtatgtacaagagcttgtcgtttttgtgcggttaagacaggtttacctaatgaacttgatttaaatgagcctgaacgtgtagctgaatcagttgaattaatgaatttgaaacacgttgttatcactgctgttgcgcgtgatgatttaagagatgctggttcaaatgtttatgctgagacagtacgtaaagttagagaaagaaatccatttacaacgattgaaattttaccatcagatatgggcggggactatgatgcgttagaaacattaatggcgtcaagacctgacattttaaaccataatattgaaactgttcgtcgcttaacaccgagagttcgtgcgcgtgcgacttacgacagaacattagagtttttacgtcgttcaaaagaattacaaccggatatcccaactaaatcaagtattatggttggattaggtgaaactatagaagaaatttatgaaacgatggatgatttacgtgcgaatgatgtagatattttaacgattggtcaatatttacaaccttcacgtaaacatttaaaggttcaaaaatattacacgcctttagagtttggtaaattaagaaaagtggcaatggataaagggtttaaacattgccaagctggacctttagtacgtagttcttatcatgcggatgagcaagtaaatgaagctgctaaagaaaagcaacgccaaggtgaggcacagttaaatagttaatatttaaccattaataaggcataaaggcttagtttgtacaaaacgaacgtgtcatagaagtaatcattatttttatgaaacactaaaagtataaactgagcctttcattgtcatagataggtgaagaatttgataaaagtagatcaacattactttgaattaatagaaaattatcgcgaatgttttaatgaagaacaatttattgctaggtattcagatattttagataaatatgattacatagttggtgactatggttacgatcaattacgattaaaaggtttttacaaagattctaataaaaaagcagagatgagtaaacgtttttcaaatattcaagattacatatttgaatattgtaactttggttgtccttactttgtattaagacatttgtctaaacaagaggttaaaaagttaatcgaagaagttcatccgtctgatgtgatagatgacgacaataaacttcaagatgtgaagattaagccaaccattcaagatactgaacattaataaaacccttagctagattgaaaatgggaatcatgcaattcaagcatggacctgtaatctagttaggggtttttatctttaatgaatgacttcatttaaatactcagtaatttcatcgccttcttcagcatttacacctaaaatatgagcgatatagccttcttcttttaaatcatcagtaccgataataccgaatttatttgtttgcatattaagtacgagtgtcttaccataatgtctatttgtatggactaacatcaaatcatatcgactatgctcgccaacaaaaccaacaaactgaacttgactctcttcgttgtcatcatataaatacatatcaatcattttgtagcgactccttttaaaagtagtaaagttagtataacgacaaatgaagtatactgcaaaattatgataatatataagtgagaggtgacaaggaatgtattttgtagacaaagataaactaactcagaaattagcctatttacaagcattaactgatgattatcatgagagcaagcacaatcattatgcatttgaacgcattgctcaaatgttgatagaatcatcggtagatatagggaatatgattatcgatgcatttattttaagggatcctggtaattataaagatgtgattgatatattagaactagaaaatgttattactaaagaaacacagcaggcgattaataaaactgtcggtattcgtaaacaatttacatatgattacacagccttagatattaagattatcatgccaatgtttgatgacgcattaccttattacaaacaatttattacagaagtaacgacatttttacatcaagaaaatgtaccagtaacagcttttggtaaaggagaaaatcaataatgaaacagtataaagcgtatttaatcgatttagatggcacaatgtatatgggaacagatgagattgatggagcaaaacaattcatcgattatttaaatgtaaaaggcattcctcatttatacgtaactaataattcaacaaaaacacctgagcaagtaactgaaaaattacgtgaaatgcacattgatgctaaatcagaagaggttgtaacgtcagcgttagccactgctgattatatttcagaacaatcaccaggagcatcagtatatatgttaggtgggagtggtttaaatactgcgttaaccgaagcgggacttgtcattaaaaatgacgagcatgttgattatgtagttattggacttgacgaacaagttacatatgaaaagcttgcgattgcaacgttaggtgtaagaaatggtgcaacatttatttctacaaatcctgatgtatcaattcctaaagagcgtggtttattacctggtaatggtgctattacaagtgttgtaagtgtatcgacaggtgtatcgccacaatttattggtaaaccagaaccgattattatggttaaagcattagaaattttaggattagataaatccgaagttgctatggtaggcgatttgtacgataccgatattatgtctggtattaacgtaggtatggatacgattcatgtacaaacaggtgtatctacgttagaagatgtgcaaaataaaaatgtgccaccaacgtattcttttaaagatttaaatgaagcaatagctgaattagaaaaatagatatagtcattttataaagtaggtgaattgatttggtaaaaatagttgtttcgaggaaaattccagataaattttatcaacaattaagtaaacttggtgacgttgttatgtggcaaaaatcattagtgcctatgcctaaagatcaatttgtgacagcacttcgtgacgcagatgcttgttttattacattaagtgaacagatcgatgcagaaattttagcgcaatcaccaaatttaaaagtaattgcgaatatggctgtaggatatgacaacatcgatgttgaaagtgcaacagcgaataacgtggttgtcacgaatacaccaaatgtacttactgaaacaactgcagaattaggatttacattaatgcttgctatagcacgccgtattgtagaagctgaaaaatatgtagaagcagatgcatggcaaagctggggtccttatttattgtcaggtaaagatgtcttcaattcaactattggaatatatggtatgggagatattggtaaagcttttgcaagaaggttgcaagggtttaatactaatattctttatcataatcgatcaagacataaagatgcagaggcggactttaatgcaacatatgtttcttttgaaacgttgttagcagaaagtgattttatcatctgtacagcgccacttacaaaagaaacacatcataaatttaatgctgaagcatttgaacaaatgaaaaatgatgcaatttttattaatatcggtagaggacaaattgtagatgaaacagcattaatcgatgcactagacaataaagaaattttagcatgtggtttagatgtattagcaaatgaaccgattgatcatacacatccattaatgggacgtgataatgttctgattacaccacacattggtagcgcatcagtaacaacacgggacaatatgattcaattatgtattaataatatagaagcggttatgacaaatcaggtaccacatactccagtaaattgaaaataagtatggtttttaatcattggtaaaacaagcaaagcaattgttaaatatgttatgcttgacttgcgaatgtatatatttgcgctgatgataattcaataacattataaactcgtcatattaatgtgatgagtttatttgattttgacgtatataacaaaattgttatatagactgtaattgtttattgtttaaataacctttaaaatgaatgatgttctcaacaaagtgtatcatttacaataattgagtgatgacaaccaattactatgttgaatctataaaattaaaattgaatttcattatgaatatcgatataatgaattgtaaaaaacaaattttaaaacgtattttatattgaacggtctttataaaggcgtttttactaagaactttaagaggtgcaatatgaaatctaaaagtaaacagccacctaataaatatgttgaagcattcaaaccatatttattaacactattgtatttggcaatatttattactttatatttaatttatggcagtggcgacacacacaataacttcatttataatgagttctaatgagggagacttaatatgacagatattattaacaagctgcaagcgtttgcggatgcaaatccacaaagcattgctgttagacacacaactgatgaattaacttatcaacagttaatggatgagtctagtaaattagcacatcgattacaaggtagtaagaaaccgatgattttattcggtcacatgtcaccatatatgattgttgggatgattggtgccattaaagcaggatgtggatatgtacctgtagacacttcaattcctgaagaccgtattaaaatgattattaacaaggttcaaccagagtttgtatttaatacgactgatgaatcatttgaaagtttagaaggcgaagtatttacaatagaagatattaaaacatctcaagacccagtaatttttgatagtcagattaaagataacgacacagtatacacaatctttacatctggttctactggggaacctaaaggtgttcaaattgaatatgcaagtttagttcaatttactgagtggatgttagaacttaataaatcaggaaatgaacaacaatggcttaaccaagcgccattttcatttgatttatctgtaatggctatttatccatgtttagcatcaggcggtacattaaatcttgtagataaaaacatgattaataaacctaaattattaaatgaaatgctaacagcaacaccgattaacatttgggtatcaacaccatcatttatggaaatgtgtttattattaccaacgcttaatgaagaacaatatggtagtcttaacgaattcttcttctgtggtgaaattctacctcacagagcagcaaaagcgttagtaaaccgtttcccaagtgcgacgatttacaacacatatggtccaactgaagctacggtagcagttacaagtattcaaattacacaagaaatcttagatcaatatccgacattacctgttggcgttgaaagaccaggcgcaagattatctactacagatgaaggtgaacttgttatcgaaggtcaaagtgtaagtttaggatacttaaaaaatgaccaaaaaacagctgaagtatttaatttcgatgacggtattcgtacatatcacactggtgataaagcgaagtttgaaaatggtcaatggttcattcaaggtcgtattgatttccaaatcaaattgaatggctacagaatggaattagaagaaattgaaacacaattacgccagtctgagttcgtaaaagaagcgattgttgtacctgtatataaaaatgataaagttattcatttaattggtgcaattgtgccaacgactgaagttacggacaatgcagaaatgactaaaaatattaaaaatgacttgaaatcacgcttaccagagtatatgattcctagaaagtttgaatggatggaacaattgccattgacttcaaatggtaaaattgacagaaagaaaattgcagaggtaattaacggatgattccatatggtgattttacattcttcttaattgctttaattgcattattaccagtcattatacttggatttttaggtaagcgaagttacatttataatggcgtagttacagcatttatgattgtgttaatcttttcttctgataaacataatctgtttgaccaaaagtatttaagtgttcaattaattagttttattatttacgtcgtatggcaagttttattgataatgttttattatcattcaaaaccaaaaaataattcattttcaaaatttgtaactgtaatggttttatcaatattgccattagcacttgtgaaagtgttacaaagtacatggttaggtggacatcagattcacttccatgaaagtaaattaattgaatttgttggtttcttaggaatttcttatgttacattcaaaagtgtgcagttaattatggaaattcgtgatggttctatcaaagaaattaaagtatggaaattaattcaatttatttcattcttcccaacgatttcatctggaccaatcgatcgttacaaacgtttcgttaaagacgataaaaaagtaccaacaggcaatgaatatcgtgaattagtattaaaagcaattcacatgattatgcttggtttcttgtataaatatattgttgcttactttattaacacatatgcaatcatgccgttacaattagacttacatggctttgtcaatttgtggttatatatgtacgcatacagcttatatttattctttgactttgcaggttatagtttatttgcgatagcatttagttatttattcggtattaaaacaccaccaaacttcgataaacctttcaaagcgaaaaatattaaagatttctggaatagatggcatatgacattatcattctggttcagagattgtatttacatgagatctttattctacatgtctcgtaaaaaattattgaagagtcaatttgcaatgtctaacgtggcattcttaatcaacttcttcataatgggaatttggcatggtatcgaagtgtattacattgtttatggtttataccatgcagcattgtttataggttatggctattatgaacgttggcgtaagaaacatccgccacgttggcaaaatggtttcacaacagcacttagcattgtgattacattccactttgtaacatttggctttttaatcttctcaggtaaacttatataataaaggagaatttaattatggaatttagagaacaagtattaaatttattagcagaagtagcagaaaatgatattgtaaaagaaaatccagacgtagaaatttttgaagaaggtattattgattctttccaaacagttggattattattagagattcaaaataaacttgatatcgaagtatctattatggactttgatagagatgagtgggcaacaccaaataaaatcgttgaagcattagaagagttacgatgaaattaaaaccttttttacccattttaattagtggagcggtattcattgtctttctattattacctgctagttggtttacaggattagtaaatgaaaagactgtagaagataatagaacttcattgacagatcaagtactaaaaggcacactcattcaagataagttatacgaatcaaacaagtattatcctatatacggctctagtgaattaggtaaagatgacccatttaatcctgcaattgcattaaataagcataacgccaacaaaaaagcattcttattaggtgctggtggttctacagacttaattaacgcagttgaacttgcatcacagtatgataaattaaaaggtaagaaattaacatttattatttcaccacaatggtttacaaaccatggtttaacgaatcaaaactttgatgctcgtatgtctcaaactcaaattaatcaaatgttccagcagaaaaacatgtctactgaattaaaacgtcgttatgcacaacgtttattacagtttccacatgtacacaataaagaatacttgaaatcttatgctaaaaaccctaaagaaactaaagatagttatatttctggttttaaagagaatcaattgattaaaatagaagcgattaaatcattgtttgcaatggataaatctccattagaacatgttaaacctgctacaaaaccagacgcttcttgggatgagatgaaacaaaaagcagttgaaattggtaaagctgatactacatcgaataaatttggtattagagatcaatactggaaattaattcaagaaagtaagcgtaaagttagacgtgactacgaattcaatgttaattctccagaattccaagatttagaattacttgtaaaaacaatgcgtgctgctggtgcagatgttcaatatgtaagtattccatcaaacggtgtatggtatgaccacattggtatcgataaagaacgtcgtcaagcagtttataaaaaaatccattctactgttgtagataatggtggtaaaatttacgatatgactgataaagattatgaaaaatatgttatcagtgatgccgtacacatcggttggaaaggttgggtttatatggatgagcaaattgcgaaacatatgaaaggtgaaccacaacctgaagtagataaacctaaaaattaaaatacaaatagcacataactcaacgattttgattgagcgtatgtgctatttttatattttaaatttcatagaatagaatagtaatatgtgcttggatatgtggcaataataaaataattaatcagataaatagtataaaataactttcccatcagtccaatttgacagcgaaaaaagacaggtaataactgattataaataattcagtattcctgtctttgttgttattcataatatgttctgttaacttaatatctttatattagaatacttgttctacttctattacaccaggcacttcttcgtgtaatgcacgctcaataccagctttaagagtgattgtagaacttgggcatgtaccacatgcaccatgtaattgtaatttaacaataccgtcttccacgtcaatcaatgagcagtcgccaccatcacgtaataaaaatggacgaagacgttcaataacttctgctacttgatcaaacatcgttgtatcttcagtaggcatcaggcaagtctcctttcgagagatgaatttgataatctttgttagtatattataatagatagtgtaataaaaatctatcaaaccaatgggggataaatatatggagcacgtgagtgtggtagtttatggggcagatgttatatgtgcaagttgcgttaatgcgccaacatcgaaagatatttatgactggctacagccgctattaaaaagaaaatacccaaatatatcatttaaatatacgtatatagatattacaaaagataatgacaacttaacagatcatgatttacaatttattgaaagaatagaacaagatgaactattttatccattaattacaatgaacgatgaatatgtagcagatggttatatacaaacaaagcaaatcactcgatttatagaccaaaagcttgtgaatgaataatatacacataactaaaagcaatgtcagtaatagtgtgaactgacattgctttttaattttaaccattgtgatatttatataaccaaagtacgccggattttaaaatagaagcgagtcgtcctgttacagtgcggtccatgatatatgcaaaaccttgcttatctcctaatgacccaacgataccttgtacctttagttccggcattttgtcaggtaatggttcatttagccattgctttttaagcacatcggcaatttgatcaccttgaacttcggctaactgagcacttggcgcatgtggtaaatcagcacaatcaccaactacatagacgttacgatatgttggtacttgatgatactggttaactatcacgcgtccattactatttatatcaatcggcaagttacgaacaacttcaacaggttgaattcctgctgtccatacaactaaatcaatatctttaggttcatcacagttatatattttaccaggttcaactttattaatatttgaatttggaacaacggtaacattatttttggcgaaccatttcgcaacatacttacttaatttttctggaaaatttcttaaaattcgcggcccacggtcataaagatatatttccaagtctgatctactttctcttaattcgctggcaagttctatgccgcttaatccagcaccaacgataccgactttagcaccttctggtagttcactaatactatggaaagtatcccgagcctttgagagtgtttgaatactatgtgtatattcttcggctcctggaacgttatgatatttatcttcacatcctaaaccaatgattagctcatcataatcaattttagaattaccgactgagacaatttgagcatctaaatctatgtcgttaatttcaccataaactgtattcacttgtggatgattagggaatttcatacgaacatctttatctgatttcgtgcccgcagctaaagcataaaattctggtttcaatccatgaaatggcatacgatcaactaatgtgactgtataatcttgtggtaaagaagtagttaaaatgcgtgacatgatacgcatattaccatatccgccgcctaacaaaactaagtttttcataatgaagtaccccttttatatgttaatatttactttaattttgaaaagatcaaagtgcatagatatatttgttaatgaacagttataaaatgcaagtgtctttgattcatcaataacccctaaaaaagtaaatatgtatttatatgcttattatatatttttttgaaaatgactacaaataaatatttgtactaactaaggcactattacataactgggataagaaacatcagttgttgctaattgagcacatcatgttaaaataccagttttaaaatgctataatattgtaacaaatgaaataagaaggtgaagtatgaatccgatcgtagaattttgtctctctaacatggcaaaaggtggagattatgtttttaatcaactggaaaatgacccagatgtcgatgtgttagagtatggttgcctgacacattgtggtatatgttcagccgggttgtatgctttagtaaatggtgatattgttgaaggtgattcgccggaagaattattacaaaatatatatgcacatataaaagaaacttggattttttaaggaggagttatcatgccaacagttatattaacagaagcagctgcttacgaagtaaaagatatgcttaaagcaaatgaaatgccagatggctatttaaaaattaaagtgaatggtggcgggtgcactggtttaacatacggtatgggtgcagaagaagcgcctggtgaaaatgatgaagtcttagaatactttggattaaaagtattagtagacaaaaaagatgcacccgtattaaatggtacgactattgattttaagcaatcattaatgggtggcggtttccaaatcgacaatcctaatgcaattgcttcatgtggctgtggtagttcatttagaactgcaaaagttgcaggtaatcctgaaaattgctaataaaataactttttaatggttaacccaatttttgggatacaaattgatatcaataacgattaaggacatatttgattatgtcctatttttgcgtaaagatattttgttttattaaaaagcttattgaaaattaagaatctgactataaatagtattttaaatgatcgtgatagcggatacatttttaatcgaaatcaggctacgaaaaaattaattaattttttcacaatctgactgaatcttgcttgaaaatataacataaaagctatagaattagtattggattaaaaatgtcttttttgtgaacatcacaggtttttacataatttaaaagacttaaataacaaaatgatgataaactagtatacattgtggtaaaagtagtaatgaccagttgttactagtaattatcagcatttggttaaaaaaatatgaaagcttaggtgaaattaaatggctcaagatcgtaaaaaagtacttgtacttggtgctggttatgcaggtttacaaactgtaactaaattgcaaaaagcgatatcaacagaagaagcagaaattacgcttattaataaaaatgaatatcactatgaagcaacatggttacatgaagcatcagcaggtacactaaactatgaagatgtattatatcctgtggaaagtgtcttgaagaaagacaaagtgaactttgttcaagcagaagtaacaaaaattgaccgtgatgctaaaaaggtagaaacaaatcaaggtatttatgactttgatattttagtagtagcattaggtttcgttagtgaaacattcggcatcgaaggtatgaaagatcatgctttccaaattgaaaatgttatcacagcacgtgaattatcacgtcatatcgaagacaaatttgctaactatgcagcatcaaaagaaaaagatgataacgatttatctatcttagttggtggtgctggattcactggtgttgaattcttaggtgaattaacagacagaattcctgaattatgtagcaaatatggtgtggatcaaaataaagttaaaatcacttgtgttgaagcagcacctaaaatgttaccaatgttctcagaagaattagttaaccacgcagttagctacttagaagaccgcggtgttgaatttaaaattgctacaccaatcgttgcttgtaacgaaaaaggttttgtagttgaagtagatggtgaaaaacaacaattaaatgcaggtacttcagtatgggcagctggtgtacgtggtagtaaattaatggaagaatcatttgaaggcgttaaacgtggacgtatcgttacaaagcaagatttaacaatcaatggttacgacaacatttttgttattggtgactgttcagcgtttatcccagctggagaagaacgtccattaccaactacagcacaaattgcaatgcaacaaggtgaaagtgttgctaaaaacattaaacgcatcttaaacggtgaatcaactgaagaattcgaatacgttgatcgtggaactgtttgttctttaggttcacatgacggtgtaggtatggtatttggtaaacctatcgctggtaaaaaagcagcattcatgaaaaaagtgattgatacacgtgcggtattcaaaatcggtggtatcggtttagcattcaaaaaaggtaaattctaggctttaaataaagtttcagctaaacacataaaattaaattattcatttataaagtccttcagtgtcactgaagggctttattgttgtacaatttgaagtgagtaacatatcaaatctaaggaggtacattatgaattttaaattaaataacacactaagcaacgaaataaatacattgattattggtataccagaacatttaaatcagttagagcgcattagttttaatcatatcgatattacagaatcacttgaaagactaaaacatcaacatattattggtagtaaagttgggaagatttatacaactgcatttgatgtacaagatcaaacatatcgtttaattacagttggtttaggaaacttaaagacacgtagttatcaagatatgttgaaaatatggggacatcttttccaatacataaagtcagaacacattgaagatacgtatttacttatggattcatttatttcaaaatatgatcagttatcagatgtattaatggcatgcggtattcaaagtgagcgtgcaacatatgaattcgatcattataaatcaagtaagaaggcaccgtttaagacgaatttaaaccttattagtgaatcattaattgaattagattttattcatgagggtatcagtattggccaatccattaatttggcaagagactttagtaatatgccaccgaatgtattaacaccacaaacatttgcagaagatattgttaatcattttaaaaatacaaaggtcaaagtagatgttaaagattatgacactttagtttctgaaggattcggacttttacaagcagtaggtaaaggtagtaagcataaaccgagattagtaaccatcacatataatggcaaagacaaagatgaagcaccaattgccttagttggtaaaggtataacgtatgattctggtggttatagtattaaaacgaagaatggcatggctacaatgaagtttgacatgtgtggcgctgcgaatgtcgttggtatcattgaagcggctagtcgtttacaactgcctgtaaatattgtcggagtgcttgcgtgtgctgaaaatatgataaatgaagcatcaatgaagccagatgatgtatttacagcattaagtggtgaaactgtagaagtaatgaatacagacgctgaaggtagattagtccttgcagatgctgtgttttatgcaaatcaatatcagcctagtgtgattatggactttgctacattaacgggtgcagcaattgttgcactaggcgatgataaagctgctgcatttgaatcgaatagtaaagtgatattaaacgatatattacaaataagttctgaagtcgatgaaatggtatttgaattaccgattactgcaaccgaacgtgcaagtattaaacacagtgatatcgctgatttagttaaccatacgaatggacaaggtaaagcgctatttgcggcaagttttgtaacacattttagtggtcaaacacctcacattcatttcgatattgcaggtccagcaacgactaataaagcttcatataatggtccaaaagggccaacaggatttatgattccgacgatagtacaatggttaaaacaacaataatttaattatttgcctgatacaacttgtgtcttgatatacatttctaatttaactcttgaaagtataaaggatcgcattgtatcaggcattttcattgttgtaagaaaatataaatcgcatatccttgtgagcataaatcaacttgactagcattgcaaaaaaatattataagcatatgttcattcagtcaacgactactaatattgcattttagaacttaggattttgattggtgttccaagcttgtaaaattgtttaatttaatgaaagctaaaattattttaagaaagacaattaactaaaaaataaagattattggtatagtttgctattgacaggtgttaaagctactgatactatgtagtctataaacgctttagttcgatagagtgataaaggatggttgtcatatgataaatgcagtagtaatagcagtaattttaatgattgtgctatgtttatgtcgattaaacgtagttataagcttatttatcagtgcgctagttggtggcttaatttcaggcatgagcattgaaaaagttataaatgtatttgggaaaaatatagtcgatggtgctgaggtagcattaagctatgctttattaggtggatttgcagcattaatttcatacagtggtatcacagactatttagtaggaaaaattataaatgcaattcacgctgaaaatagtcgatggtcaagagttaaagtcaaagtgacaataatcattgcattattagctatgagtatcatgagtcaaaacttaattcctgtacatattgcattcattccaattgtcatcccaccattgttaagtctgtttaatgacttaaaaatagatagacgtttaatcggtttgattatcggttttggtttatgtttcccgtatgtgttattaccatatggattcggtcaaattttccagcaaattattcaaagtggctttgcaaaggcaaatcacccaattgagtttaatatgatttggaaagcaatgcttattccttcaatggggtatattgttggcttacttatcggtttatatgtatatcgtaaaccacgtgaatatgaaacacgtaaaatttcagatagtgacaatgttacagagttaaaaccatatatcttaatagtaacaattgtagcaatactagctacatttttagtacaaacatttacagattcaatgatttttggtgcactggcaggggtactcgtattctttatttcacgtgcatataattggtatgaattagatgctaagtttgttgaaggtattaaaattatggcttatattggtgtagttattttaacagcaaatggatttgctggtgtaatgaatgctactggtgatatagatgaattagttaaaactttaacaagtattactggtgataataaattatttagcattatcatgatgtatgtgataggtttaattgtcactttaggtattggatcatcatttgcaacaattcctattatcgcatcattattcattccttttggagcgtcaattggactagatacaatggcattaatcgcattgattggaacagcgagtgcattaggtgactcaggttcgcctgcaagtgattcaacattaggaccaactgcgggattaaatgttgatggccaacatgatcatatacgtgatacatgtgtaccaaacttcttgttttataatattcctttaatgattttcggtactattgctgctatggtactataagcataaagaggtgaaaatatgactcatttattagagacatttgagatgtcaatagatcaccaggaagatggtttagttgttatttctatgcctgttactgataaagtaaaacaaccatttggatatttacatggtggggcttcgattgctttaggtgaaacagcatgttcattaggatctgctaatttaattgatacaaccaaatttattccattaggtttagagatgaatgctaaccatattcattctgctaaagatggtcgtgttactgcgacagctgaaattattcatcgaggtaagtcgacacatgtatgggatataaaaattaagaatgacaaagaacaattaattacagttatgcgtggtacagttgctattaaacctttaaaataaaagaactgctagctgaaatgttatgagatattcataactacggctagcagtttttttatgcgctatattgttgtagttttagaaatgcttgttcaatgcgttcggcagctttacggccacccataacatttctaccaaatggtcctaattctaagtctgcaaagcatcctgcgacaaatagatttggtatccattctaatttttcggaaataacagggtaattacattcgttgataggtgcatcataattttgtattaattgcttaataagtggttgtgacataaaatcttgttcaaaaccagttgcaaccataatctgttgatatggaacagaatcattttcagtgttaattacaccaccactaatttgagtgataggtgttttatgcacatttatacgaccatttttaatatgttttttaaggcgtaagtacagttcgtgaggcattgatcctttatgacgttcgcgttgtacaatggcatttctttcaggcatgcttttagtacttaaaaatgaagacatatttttcggacctaaccaaccaggatcagcatcaaagtcatgtatttcaatatctttatttagccataaatgaatctttttatcgttatcatgatttaacaatttaagtgcaagatgtgcagcagtaatgccgctaccaacgatatgatcggtcttatcatatactacttgatcaagttctttctcgaagatatgatttacattctgtttgtcttttaaaatgtcaggcataaacggaatatttgtactgcctattgcaataacgacgcaatctgtagtgataatttgtccatcttctaacttgatatgccatttgtcttcttgtttatctaaagtttgaactaaaccttgaaccaagcaatcctctaattgatattgtttagaagcatgtgcaatatgatccataaacattgtcaattcaggtcgttgataaggaccataaaaagcatttgtatattggtgctgtttagcgaattgttttagatggaacggttgtggatgtacgtgatgtacaatcggtgatcttaaataaggcatttctattcgatttgtatatgagttaaacctttggcaaaaagtttcgtgtgggtcaatgattgttaatcggtctgttgttaatccgcttgataatagtttttgtgcgattgcagttccctgtatgccaccgccgataattgtccaatgcataataaaacctctctctttttaaaacgtaatcgttacgatttataattattattatcataatacataacgacatgaaaggcaattaaattaaagagatatatgtagatagggcgaatctgtagtcaaagaaaaaatcattgaaaaagaggtaacaatgtcaaaagaaaacagcagtaaaatcattcctaatttggaatcatcttactgctgtttgttgttgatttatattcatgattttgttatataatctacaattttgtgtcttttaagtcttccgaaatttcatcgactttagtctttttagtataaggcgttttaatattatatgctgctttcataatcatatgacttgaaagaggacctgtaattaatacaaagataatcgcaacgattaattgcatatttacaaaaccttgagtagcaataaaatataaaaacgtaccaaatagtaatgacattgcacctaatgttgatgcttttccggcagcatgtgcacgtgaatatacatcttcaagtctcaataatcctatagctgctagggcgctaattaaagcaccgatgataacaaagataagtgcaagactaatcagtatgattttgatcatgttcaatcaccttacctttgtccataaatttagagaatactgcagtacctaaaaaagctaatataccaatcatcataataacgacaatcatgtatttaatatttaataaaatactgaataatgctataactgccattaattgaagaccaatcgcatctaatgcgacaacacgatcggcaagtgatgggcctagcacaacgcgaatgagcatagctaacatagaaatgacaactatgattaatgcaataacgataataacattatgattcattatatttcgcccacctctcttacaattttctctaatgatgttttaatactttctacttcttgctctttagttgaaaaatctatggcatgaatataaatttttgtacgatcgtcacttacaccaagcactacagtaccaggtgttaatgtaattaaattagacagcaagacaatttgccaatctttttttaaatctgtgtgataaacaaagaatcctggttcatttttaatcgaaggtttaataataattttcaaaacatcaaaattagctttaatcagttcgattaagaaaataataactaatttaataatacgatatagcgtgatgacataaaatctacctggtaacactctgtgtaagaggtaaacaagaactaggccaaagatgaaacctaacacaaagttatttgttgtgtaactatttgtcacaaacaaccaaaacactgcgataataaagtttaatactaattgtacagccatgttatttacctcctaatacagctttaacgtaggttgatggattgtagaatgtttctgcaccagcttttaccattggatataagtaatctgctgacaatccatataaaacagttatcacaactgcaacgattgcaatcgtagttaaatatttgacgtcgactttgttattaagatcatatccttttggttgaccgaaaaagccttgtaggaatatgcgaatgacagaatataatacgactaaacttgataataagacgatgacaccacttaaataaaatcctctttcaaatgttgattggacaataaaaaattttccataaaagccactgagtgggggaatgccagctaaacttaatgctgcgataaagaatgaccaaccaagtacaggatatcgtttaattaagccaccaaattgtcttaaatcagcagtgcctgtaattttaatcataattccgataagcaagaataatgcaagttttactaacatgtcgtgcaatgtatagtaaatagccccaatcatacctgactctgtcatcattgcaacgccgactaagatcacacctacagcaatcatgacattgtataggatgatttttttaatgttggcatatgcaacagcaccgacacaactaaagatgatcgttaatagtgctaagaataaaatgacataatgtgaaaagcttacattatcactaaagaataggctcaatgttctagcgattgcataaacaccaacttttgttaacaaagcaccaaagaatgcaatgattggaattggtggtgcatagtatgcactaggtaaccaaacaaacattgggaatacgccagcttttgtagcaaaaacaaagataaatagtatgaaaacgatattgactaagccactgtcatgcgctgaaaggttagctaatttattgcttatatctgctagattcaatgttcctactactgaatataaaatcgctacacccattacgaagaaggatgacgatacaacgttaacaagaacatattttattgtttcttgtagttgaatttttgtagaaccaattactaataagaaataagatgacattaaaaatacttcgaaaaatacgaataggttgaaaatgtcaccagttgtgaatgcaccaatgatacctattaacataaatagtactgaaaaataataataatatctttcacgttcaataccaattgtttggtatgaatataaaatcacaatagctgtaataataatactagtaattattagtagggcactgaatatgtctaatacaaagacaatactgtatggtgctttccatgaacctagctctacgcgtattggtccatgtttaacaacatttgctaaattgataattgccgcgaccaaggttaataatgtaccgcctagtgcgacataacgctttataataggacgctttccaataaagacaagtaatatggctgtaattactggaataactagcgttaacacaagcatattactttcaatcatcttctggaactcctttcatactctcaacgttatctgtgcctaattctttatatgttctaaatgctaatactaagaaaaaggctgttgtcgcaaaggcgataacgattgctgttaaaataagtgcttgcgggataggatcaacatagctttttacgttcgcttcataaattggaacagtaccatgtttaagtccgcccatagttattaaaaataaatttgctgcatgtgttaatagtgtagttcccataacaattcgtatcagacttttagacaaaacgagatagacactaattgctgtgagaataccactaacaaaaatcataataatttccactattcgttctctccaatcgaaataataattgtcatgacagtaccaactactgcacataaaacaccgaaatcaaagaatactgctgttgtcatatgaacaggttctaatataaataacggtatatcaaatgtgacatgcgtaaagaaatttttgcctaaaaaccaacttgcgataggcgtcgcaatacaaaaaactaatccgatacctatcaagattttaaaatctaatgggaaaattttacgcattgtttctatatcaaatgcaatcgtaatgataacaagtgaacttgcgaataataatccgccgacgaaaccgccaccaggtgtataatgtcctgctaagaaaagtgaaaaaccaaagaccattaccatgaaaaagataataactgcagcaaattgcaaaattagatcattttgttgtctattcatgatttttcacctcgttaccttgcgtttgacgctttttacgtaatttaatcattgtatatacagctaatcctgcgataccaagcacagatgactcgaataaagtatccataccacggaaatcaacaagtatgacgtttaccatgtttttaccgtgagctaaatcataaacgtgctcttgataaaacttagatatcgattcaaaatgtctatttccgtatgcaattaaaccgataataatgacggacaaaccaacaccaccagcaattaaagcattagtaagctggaatgagcgcttttcattataacgatttaaatttggtaagtggtagaagcataataagaacaatgctgttgaaatagattcaacgacaaactgtgtcaatgctaagtcgggtgctttaaagaatataaacaatacagacacagcatatccaactgcacttaacataatgatgctaaataatcttgatttagcgaaaagaattaaaaaggcagcacttaataataaaattacgatacaaacttcgaaaattctaatcggactaacgtctttaaaattaatgttgaaaggtactgagaatatagtgacaaatgttaataaaattaatgcaccaaaaatgataactaaattattacgtgaataatcggtaacatagctattcgtcatcttttcagagtagtttggaataacatttgcacttctgttgtaccaataattgaatgttagtttaccaggttgtcgttgcaacaatttcacccaataactaaatgtcacaattagtaagatacctaaaatataaatcactaatgttgataaaaaggcaggcgttaatccatggaacatatggaattcaacatcatcaattaccgtatgattaatcgaagatgtagctggttcaataatcgaattagttaaaatgccagggaataaaccaaatacaattactaatgtagctaaaatagctggtgataaaagcattaatattgatacttcgtgtgcttttttaggtaattgttcaggtttatattgtccgaaaaatatatgcattataaatttaattgaatatacaaatgtgaagacactgcccactataccaatgattgggaataggtagcctaatgtatcaacactgaataaatttgcttggcttgctgtaaatgttgtttctaaaaatgattcttttgataagaaaccattgaacggtggtacaccagccatacttaatgctgtaataacagtgattgtaaatgaaataggcataattgttagtaagccacctaatttcttaacatcacgtgtaccagtagaatgatccactgcacctgtaatcataaatagggcacctttaaatgttgcatggttgattaaatggaatattgcagccgtaaatgcagcagcatatattttgctatcatcgccttgatagtgataactaatggcaccgattccaagcatcgccataatcatacctaattgggatactgttgaaaatgccagtatacctttcaagtcttgttgttttgttgcgtttagcgaagcccagaataatgtaattaaaccaacgagtgtgacagtccatacccaaccttgcgatgctgcgaagattggtgtcattcgagcgattaaatataaccctgctttaaccattgttgctgaatgaagataagcactgactggtgtaggtgcttccattgcatctggtagccaaatataaaatggaaactgagcagattttgtaaaagcaccaatcatgattaaaatcatcgcaaaaatgaagaatgggctattttgaatttcagaagcatgttgaatcatgtactgaatgctaaatgattgtgttggtatagcgagtaagatgataccacctaataatgatagaccaccaaatactgtgattatgagcgatttttgagcaccatatatagatgcttgtcgttcgcgccagaatgaaataagtaaaaaactagaaaatgacgttagctcccagaataaatatagaataataacattatctgaaagtacgacacctaacattgcacccataaatagtaataaataacaataaaaattccctagttgttctgacttacttaagtagccgattgaatataatactactaaactgccgattcctgaaataagcaaactaaagagtaaacctaagccatcaagatataaatcaaagttcataccaaaatgaggcatccaatttaaggttttcattacagtattacctgacatcgtcgttttaattaatgtaagcatataaataaatatgacgatagggacaggtaatacgaaccatcctaaatgtatacgtttaaaaaatctatacaggataggaataatgagtgcgaatattaacggtaatatcaccgcaatatgtaacaaactcactatgttgtcctcctttaaaaaatatttatgttattcattatacatgaatgatatagttctgaaaaacgtacacactccttgttgtgctttattttcagaagtatttaaataagaagaaacacgtcattttttatttaaaattttctttgtattgaagtgaataatcttcttttaagcgtgctaaactagctaaagacatttcagcatgttttgtttgctgagctttaagtttagtttctaaatctgtaattgcttgttgaagtgaatcttcatagcgcaatacatcaacattgaagtcgcgtaattgtgaacgtttcgtatagcgtttttcaaaatggcttaatgctttgcggtcatggaaaaatacaccttcagtttcagtagggttatgtaaatcaccttgtttcgggtgtttgataacttgttcaactttaacaaggacatcgtctccattttcttcaacaatcgtgacaccatagctacctgttttgtgtgaaaatcgatatagcttcatgctattttcctcccttaaaagtatgttaatatatatgtatcataacatgaatggagaatataaatggctaactatccacagttaaacaaagaagtacaacaaggtgaaatcaaagtggttatgcacacaaataaaggtgacatgacattcaaattatttccaaatattgcaccaaaaacagttgaaaattttgtgacacatgcaaaaaatggttattatgatggaatcacattccaccgtgtcattaatgacttcatgattcaaggtggcgatccaacagctactggtatgggtggcgaaagtatttatggcggtgcttttgaagatgaattttcattaaatgcatttaacttatatggcgcattatcaatggctaactcaggacctaatactaatggttcacaatttttcattgttcaaatgaaagaagtacctcaaaatatgttaagtcaacttgcagatggtggctggcctcaaccaatcgttgatgcatatggcgaaaagggtggtacaccatggttagatcaaaaacatacagtattcggtcaaatcattgatggtgaaactacattagaagatattgcaaatacaaaagtgggaccacaagataaaccacttcatgatgttgtaattgaatctattgatgttgaagaataatatctaaacataattaactaccaacattttaaactcggataaagctaatttatgaatggattagtatatattccaacgaaaataaataaactaatatgatgagcaatctcaatatatttatcaagaaagcacagtttttaaatagatgtgtattttaaagataatagttgaggttgctttttatgtttttacagagaattgctattcaaatagtaaataaattgaaaacaaagtagctggatatcatattgatttagataggaatttgttgctaattttatttgtaaatccaagtttgtagaattcttattcatttataaaataatattcgtatgatttgatgttttaattagtccaccatttcgatttgtgctatgataatagtgttaagtaaacgaaataaggggttattaagttgaataactacaaaattggccaacatatcaaggtgcgtgtaactggtattcaaccatacggtgcgtttgttgagacccctaatcatactgaaggactgattcatatatcagaaattatggatgactacgttcataatttgaagaaatttctatcagaaggccaaattgttaaagctaaaattttgtctatagatgatgaaggaaagcttaatctatcattaaaggataatgattacttcaaaaattatgagcgtaagaaggaaaaacaatcagtattagatgaaatcagagaaacagaaaaatatgggtttcaaacacttaaagaacgcttaccaatctggataaaacagtcaaagcgagcaattcgaaacgactaaaggaacagataaatcgtaccgaaaatcatacaaagggtctgaaatgaaagtttcttagactataaaagagattagtatctattaaattttattagatactaatctctttttgtctacgataacgtaatatgattgattctatttacacgtacaaatggtttaaggtgacatatccattatctttgttagatagaatcgttgatttgcaatattgtatgtggatttgttttttttatttattttagaaatgagaactacaacttaaagtattaaacgaattgcaactatataaacagataattggagaatgaaaaaattacatgttatagtcaactcaataattttaaggaggaattaagtaatgaaaagtaaatacgaaccattgtttgataaagtagaattaccaaatggagtagagttgagaaatcgatttgtgttagcccctttaacacatatttcttcaaatgatgatggtactatttcagatgtagaacttccttatattgaaaagcgttcacaagatgttggtattacaattaatgctgcgagtaatgtgagtgatgtcggaaaagcatttccaggacagccatcaatcgcgcatgacagtaatattgaaggactaaaacgattagctacagcaatgaagaaaaacggtgccaaagcactcgtacaaatacatcatggcggtgcacaagcattgcctgaattaacacctgatggagacgtcgtagcaccaagtccaatttctttaaaaagttttggtcagaaacaagaacatagtgctagagaaatgacgaatgaagagattgaacaagcaatcaaggattttggtgaagcaacgcgacgtgcaattgaagcagggtttgatggtgttgaaatacatggcgcgaatcattacttaattcatcaatttgtatcaccatactataatagaagaaatgatgtatgggcaaatcaatataaattcccggtcgctgtgattgaagaagtacttaaagcgaaagaagcgtatggcaataaagactttatagttggatacagattatctccagaggaagcggagtctccaggaatcacaatggaaattacagaggaactcgttaataaaattagccatatgccaatcgactatattcatgtttcaatgatggatacgcatgcaacgacacgtgaaggtaaatacgctggacaagaaagactgcctttaattcacaaatggataaatggtcgtatgccacttatcggtattggttcaattttcacagctgacgaagctttagatgcagttgaaaatgttggtgttgacttagtagccattggtagagagctactactggattatcaatttgttgaaaaaattaaagatggacgggaagatgaaattattaattactttgatccagagagagaagataatcatcacttaactcctaatttatggcatcaatttaatgaagggttttatccattaccacgtaaagataaataagtgtttaactgttaccactaatgatattgtgtatgcaatttgttagtggttttcaatatttataaataaaaatattcttagtaaaatatacttttgattaagtgtaaaattatcaattcttttgcttgtaatcatttaagtaattatgtcattataaatgtaagggttttcaaaatagacaaatttaatgaaacttagtgattatttcatcttttttggtggaaaagtatctgctttgaaaactaatgtaattatttggataatgtttcatgtataatagttataaatgatgaaaaggggagatatgatgactaaatctgaaaaaattattgagttaacaaatcattacggagcacataattatttaccattgccaattgtcatttcagaagctgaaggggtatgggttaaagatcctgaaggcaataaatatatggatatgttatctgcatattccgctgttaaccaaggtcatagacatccgaaaattattcaagcattaaaagatcaagctgataaagtgactttagtttcacgtgcttttcatagtgataacttaggtgaatggtacgaaaaaatttgtaaactggcaggtaaagataaagctttaccaatgaatacaggtgctgaagcagtagaaacagctttgaaagcagcacgacgctgggcatacgatgttaaaggaattgagccaaataaagcagaaatcattgcatttaatggtaacttccatggtcgaacaatggcgccagtttcattatcttcagaagcagaataccaacgtggttatggtccgttattagatggatttagaaaagttgattttggagatgtagatgcattgaaagctgcaattaatgaaaatactgcagcagttttagtagaaccaattcaaggtgaagcgggtataaatataccgccagaaggatatttgaaagcaattagagaattatgtgatgaacataatgtcttatttattgctgacgaaatccaagcaggattaggtcgttcgggtaaattatttgctacggattgggataatgtaaaacctgatgtctatattttaggtaaagcactaggtggtggagtcttcccaatttctgttgtattagcagataaagaagtattagatgtctttacacctggctcacatggttcaacatttggtggtaatccacttgcttgtgctgcatcaattgctgcattagatgttatcgttgatgaggatttaccaggccactctttagaattaggagattattttaaagaacaattaaagcaaattgatcatccatcaattaaagaagtccgtggacgtggtttgtttataggtgtggaacttaatgaaagtgctagaccatattgtgaagctttgaaagaagaaggcttattatgtaaagaaacgcatgatactgtcattcgttttgcaccaccattaattattactaaagaagaattggaccttgcacttgaaaaaataagacatgtatttcaataatgtcaaaaagttgtaacaatcagtttgtaagggctttaaaaaggaatacgttatgttacaatatgtttgaaagcgaaatcattaggtaaagaagaggcgaaaaggatcatgactgagaacaataatttagtaacttctactcaaggaattattaaagaagcattgcataaattgggatttgacgaaggaatgtacgatttaattaaagaacctttaagaatgttacaagtgcgtatccctgtacgaatggatgatggcacagtaaaaacattcacaggttaccgtgcgcaacataatgatgctgttggaccaacaaaagggggcgtgcgtttccacccagatgttgatgaagaagaagtaaaagcattatcaatgtggatgactttgaaatgtggcattgtaaacttaccatacggtggtggtaagggtggtatcgtttgtgatccacgtcaaatgagcattcatgaagttgaacgtttatcacgcggatatgtaagagcaatttcacaattcgtaggtccgaacaaagatattccagcaccagatgtatttacaaactcacaaattatggcttggatgatggatgaatatagtgcattagataaatttaattcaccaggtttcatcacaggtaaaccaattgtattgggtggttctcatggacgcgacagatcaactgcactaggtgtagttattgcaattgaacaagctgcaaaacgtcgtaatatgcaaattgaaggtgccaaggttgttattcaaggtttcggtaatgccggaagtttcttagctaaattcttatatgatttaggtgcaaaaattgtaggtatctctgatgcttacggtgcattacacgatccaaatggcttagatatagattatttattagaccgtcgtgatagttttggtacggtaacaaatttatttgaagaaacaatctcaaataaagaattgtttgaattagattgtgacattttagtaccagcggctatttcaaaccaaattacagaagacaatgcacatgatattaaagctagtatcgttgttgaagctgctaatggacctacaacaccagaagcaacacgtattttaactgaacgtggtatattattagttccagacgtattagcaagtgctggtggtgtaacggtttcttacttcgaatgggtacaaaataatcaaggttattattggtctgaagaagaagttaatgaaaagctacgtgaaaaattagaagcggcatttgatacgatttacgaattgtctcaaaaccgaaaaatagatatgagacttgcagcatatatcataggtattaaacgtacagcagaagcagctagatatcgtggttgggcataattaattatcatatgtgatttaacgagcttgggacagaaaacaaagccctaagctcgttaattttattttagcagtagttgactgtaaaacaatgcccgtgtaacacgctcttttcaaaaatagtcggggccccaacacagaggctggtggaaagtcagcttacaatagtgtgcaagttggcggggccccaacacagaggctggcggaaagtcagcttacaatagtgtgcaagttggggtggagccccgacacagagaaattagctcctcaatttctacagacaatgcaagttggcggggccccaacacagaagctggcgaaaagtcagcttacaatagtgtgcaagttggggtgggacgacgaaataaattttgcgaaaatatcatttctgtcccactcccaaaaagacagcagtaggataatttcaatttggaaatatcttactgctgttttttatagtaatagctatatttttgtatttatgttttctagtttaacattactacttaatgacttctttatatttatcagcgaaatttgtaaagacaccatcaacgccatatttatttaatcgtaacatatcagctttttcattcactgtataaggatgtactataaatcctaagtcttttaaatgatgggtattttgttcagttaaatctgtataatcaggacctaatccaatcgcataagagcgtatctcttttaagcgttggtcgttaaattgttgtagttcacctttatcaactaattttactaatggcacatgcttattttgacgatgaattttctttaaactttcgtcagaaaatgattgaatcattacatgtccattttttaatttattgttatttaaaaggtgatgctttttcaatgaagctaataattgttcttccattcctgggtatacatcaggtgactttgtttcaatataatagtttgcattcgggccataacgttctaaaatttcatctaaagtgggtactttagcatttttataacttgctcttgcgtattttggatattttttattaaaccaacttcctgcatctaactgttttaattcatcaagggtataatcctcaactttaccgtgtccatttgttgtacggttaacagtttcatcatgcatagcaactaaatggccatctttggtacgttgtaaatcaatttcgatataagatgcttttaactcattatgactcttatcatatgcttgaaacgtatgctcgggtgcatagccacttgcgccacgatgtgcgatagtagtgaatcgctcattcgttaaatttgtatgccattgaatagcctgaggtttatttgcaatttgatttgtttgttcagcgccagcagtaggtactgataaaaatcccatagtaaaaacagcagaagcagccataaatttagtgaagcttttcgaagagttagtcatagtctttatcctttcatctctttatttgtagtctaacaattttaaaatactacaaaaacctgcttgtgaaaacgctttacacatttcttttacaatttataacatttttgtaatataaatttaaaagaattatcaaacattttaggaatcttaaaaatgtgatgttcaacaagacgaagagagcattaaaatacccacaatgtaattttaatagacattgtgggtaggtagattaacgtatttattgtgatagtaattgtttagcaacatcaagttgttgtttgaccgatgattgacctgttgaaccgtaactttgacgtcgttttaaacaattttcaggctgcaaataatcgtaaatatcggcatcaatactagaatgatgttgttgatatgttgctaaaggaacatctaataaataatgaccttgttgtatacattctaagacgatttttcctacaatttcatgtgcagttctaaatggaatatttttagttactaaataatctgctagttccgttgcatttgaaaaatcttctttaacagtttgattgagtcgttctttattaattgtcatcgtttgaatcataccttcgaaaatacgtaaagaacctttaattgtatggacagcatcgaataaaccttctttatcttcctgcatatctttgttatatgctagaggtaatccttttaaagtcataagcatgctcattaaatgaccagtcgttcgaccaactttacctctaattaattctgccatatcaggatttttcttttgtggcataatagatgagccagttgaaaatgcatctgataatgtaatgaatttagcttcgtctgtggaccagaaaataatttcctctgcaaagcgtgataagtgaaccatcgttaaagaaatattatgcaatgtttcaataatatagtctctgtcactaacagcatctaggctattctcatagagactgccaaagttcaacaatgctgttgtctcgtgtctatcgatagggtatgtggtaccacttaaggctgctgcacctaaaggattaatatcgattcgttttaaactatcttcaaatcgttgttggtctcgttgtaacatccaaaaataagtcataatatgatgtgcaaatgaaattggctgtgcacgctgtaaatgagtataaccaggcataattgtatcaacattattggaagcgatgtctacaattacactttgtaacgacttaattaatgcgatgatatcttgcacttgtttcttagtgtacaagtgcatgtctgttgcaacttgatcgtttctactgcgtccagtatgcaacttaccaccagcatcaccgatacgtttaattaattcatgttcaatatttaaatgaatatcttctaatgatgcactaaattgaatttgatcttgatgataatcatgttgaatagattttagtccttgtataatttgttcgctgtcttgttgactaataatgccttgattcgcaagcatagttgcatgtgcaatgctgccttcgatatcttgatctatgagcgtttgatcaaaagtaatggatgcgttaaagtcgtcaacccactcttcaggttgtacttcaaatctaccgccccaagctttattgctcattgctatagcctccatgcaacatcgcatttacttgagtaggtaaaccatagatatcgataaagccaacagcagcgtcttgattaaatgcatcttcttttgtataagttgctaatttttcatcatataatgtgtaaggtgattttctaccattcacgatggcattacctttgaataatttaattctgacatcaccacttacgtattgctgagtactatcaataaataatttcaagctatcagttaaaggtgagaaccaaagtccattgtatagttgttcagcaaattgcttctcaatgattggtttaaagtgtgcgacatctttcgttaacgtaatcgtttctaatgctttatgcgcttttaaaataacttctgcagcaggtgcctcataaatttctcttgatttgatacctacaagtctattttctacatggtcaattcttccgataccatgcttaccagctaatgcattcaacgttaaaattaaatcgtctaattcatatgttttgccatcaatttgaactgggatgcctttatcaaacgttaaaatgatttcatcagcagtatctggtgtttcttctaaagcatttgttagatcgaacgcatcctctggtggcgcagcataaggatcttctaaaataccacattcattcgctctgccccatagattttgatcgatagaataaggtgaatcatggttgattgatacagggatattatgtttaattgcataatcgatttcttcttcacgactccatgcccactcacgtacaggtgcgaatgctttcaatgatgggtttaatgctttaatggcaacttcgaaacgtacttggtcattccctttaccagtacaaccatgtgcaatacctactgaatttgttttctcagcaatctctactaattttttagcgattaatggtcttgataaagctgaaactaatggatatgcattttcatacattaaatttcctttgattgcataacttacatactcatcactaaattcttttgttgcatcaataatatgacattcaactgctcccatatctaaagcttttttataaacgatgtctaaatctttaccttcaccaacatctaggcaacaagctacaacgtcgtatcctttgtcgataagccattgaacggccacacttgtatctagtcctcctgaatatgctaaaacaattttctctttcataaaattcacctcattgtagttatctgaatatttcgtatgaacacatgatagcaaacttttaatgaaaataaaaccattattttacatatttattcataaaatgcgatagagatagttagagttgtaagtgtaaatgcttatttatcaatgtttaaaagtattttaaaaaacatgcaaattgtataaaaaatgtttgagtgtttgacgccagtttgaaatgtttgttgaaaaataggtgtgaaacgtcacataaatatcaattttattgattaagtacaaacttgtgaattgaatcgcaaacgtaaacttagtaaaattaagatattaaatgaaacaggaggcttttatagatgactcatattcaattagattttagtaaaacgttagaatttttcggtgaacacgaattaaaacaacaacaagaaattgttaaatcaattcacaaaacaattcatgaaggtactggtgcaggtagtgacttcttaggctgggttgatttaccagttgattacgacaaagaagaattttcaagaattgttgaagcatcaaaacgcattaaagaaaattctgatgttttagtagtcatcggtattggtggttcttacttaggtgcacgtgcagcaatcgaaatgttaacgtcatcatttagaaacagcaatgaataccctgaaattgtatttgttggtaatcacttatcatcaacatatacgaaagagttagttgattatttagcagacaaagatttctctgtaaacgttatttctaaatctggtacaactacagaaccagcagttgcatttagattgttcaaacaattagttgaagaaagatacggtaaagaagaagcacaaaaacgtatatttgcaacaacggataaagaaaaaggtgctttaaaacagttggctacaaacgaaggttatgaaacgtttatcgtacctgatgatgtaggtggaagatattctgttttaacagcagtaggattattaccaattgcaacagctggaattaacatcgaagctatgatgattggtgctgcaaaagcacgtgaagaattatcttcagataaattagaagaaaacattgcataccaatatgcgacaattcgaaacattttatatgcaaaaggttatacaacagaaatgttgattaactatgaaccatctatgcaatactttaatgaatggtggaaacaattatttggtgaatcagaaggtaaagacttcaaaggtatctatccttcaagtgccaactacacaactgatttacattctttaggtcaatatgtacaagaaggccgtcgcttcttattcgaaacagttgtaaaagtaaatcatcctaaatatgatattactattgaaaaagatagtgatgatctagacggattaaattatttagctggtaaaacaatcgacgaagttaacacaaaagcattcgaaggtacattattagcgcatactgatggtggtgttcctaacatggtagtgaacattccacaattagatgaagaaactttcggttacgtcgtatacttcttcgaacttgcttgtgcaatgagtggataccaattaggcgtaaatccatttaaccaacctggtgtagaagcatataaacaaaacatgttcgcattattaggtaaacctggttttgaagacttgaaaaaagaattagaagaacgtttataaaatacattacttcaaagattagtgaagtttgaaaagatagaactagacgttaactatttaaagcatattttcgaggttgtcattacaaatgtaaaaatgtaatgacaacctcgtttttatttatatgcaagaactaggttactagctaatgtgacaagatgttaagagaaaattaaagataaaataatatctgccttacaataatattgttatactactagagactgatttattagcatgattacatgttaatgtttctttacttagtaattaactttataatgtaagaataattatcttcaaccaaagaaagggattgatgatttgtcgtttcatcaagtagaagaatggtttgagatatttcgacagtttggttatttacctggatttatattgttatatattagagctataattccagtatttcctttagcactctatattttaattaacattcaagcttatggacctattttaggtatattgattagttggcttggattaatttctggaacatttacagtctatttgatctgtaaacgattggtgaacactgagaggatgcagcgaattaaacaacgtactgctgttcaacgcttgattagttttattgatcgccaaggattaatcccattgtttattttactttgttttccttttacgccaaatacattaataaattttgtagcgagtctatctcatattagacctaaatattatttcattgttttggcatcatcaaagttagtttcaacaattattttaggttatttaggtaaggaaattactacaattttaacgcatcctttaagagggatattaatgttagttgtgttggttgtattttggattgttggaaaaaagttagaacagcattttatgggatcgaaaaaggagtgacatcgtgaaaaaagttgtaaaatatttgatttcattgatacttgctattatcattgtactgttcgtacaaacttttgtaatagttggtcatgtcattccgaataatgatatgtcaccaacccttaacaaaggggatcgtgttattgtaaataaaattaaagttacatttaatcaattgaataatggtgatatcattacatataggcgtggtaacgagatatatactagtcgaattattgccaaacctggtcaatcaatggcgtttcgtcagggacaattataccgtgatgaccgaccggttgacgcatcttatgccaagaacagaaaaattaaagattttagtttgcgcaattttaaagaattagatggtgatattattccgccaaacaattttgttgtgctaaatgatcaagataataacaagcacgattcaagacaatttggtttaatcgataaaaaggatattattggtaatgttagtttacgatactatcctttttcaaaatggactgttcagttcaaatcttaaaaagaggtgtcaaaattgaaaaaagaaatattggaatggattatttcaattgcagtcgcttttgtcattttatttatagtaggtaaatttattgttacgccatatacaattaaaggtgaatcaatggatccaactttgaaagatggcgagcgagtagctgtaaacattgttggatataaaacaggtggtttggaaaaaggtaatgtagttgtcttccatgcaaacaaaaatgatgactatgttaaacgtgtcatcggtgttcctggtgataaagtagaatacaaaaatgatacattatatgtcaatggtaaaaaacaagatgaaccatatttaaactacaatttaaaacataaacaaggtgattacattactgggactttccaagttaaagatttaccgaatgcgaatcctaaatcaaatgtcattccaaaaggtaaatatttagtgcttggagataatcgtgaagtaagtaaagatagccgtgcgtttggcctcattgatgaagaccaaattgttggtaaagtttcatttaggttctggccatttagtgaatttaaacataatttcaatcctgaaaatactaaaaattaatatgaaacaaatacaacatcgtttgtcggttttaatactgataaacgatgttttattttgttagtaccacaataaaagctaagttcgaaatgaacttataataaatcaatcacaatcactttgtgttaaaatatgtgtcaaaggaagtgagggtttgtcatgacattacatgcttatttaggtagagcgggaacaggtaagtctacgaaaatgttgaccgaaataaaacaaaaaatgaaagcagatccgcttggagatccaatcattttaattgcgccaactcaaagtacatttcaattagaacaagcctttgtcaatgatccggaattaaatggtagtttaagaacagaagtgttgcattttgaacgattaagtcatcgtattttccaagaagttggtagttatagcgaacaaaagttatctaaagctgcaacggaaatgatgatttataacattgttcaagaacaacaaaagtatttaaaactttatcaatcacaagcaaaatattatgggtttagtgaaaaattaacagaacaaattcaagattttaaaaaatatgcagtaacgcctgaacatttagaacactttattgctgataaaaatatgcaaactcgaactaaaaataagttagaggatattgctttaatataccgtgagttcgaacaacgcattcaaaacgagtttattacgggtgaggattcattacaatattttattgattgtatgccgaaatcagagtggctaaaacgtgctgatatatatattgatggttttcacaacttttcaacgattgagtatttaataatcaaaggattaattaaatatgcgaagagtgtcacaattatattgacgacagatggtaaccacgatcaatttagtttatttagaaaaccatcggaagtgttacgacatattgaagaaatagcaaatgaactcaatatttctattgaacgtcaatatttcaaccaattatatcgcttcaataatcaagatttaaagcatcttgaacaagaatttgatgcacttcaaatcaatcgagtggcatgtcaaggtcatatcaatattttagaatctgcgactatgagagaggaaataaatgaaattgcgcgacgtatcatcgttgatattcgtgataagcaattacgatatcaagatattgctattttatatcgtgatgaatcttatgcttatttatttgattccatattaccgctttataatattccttataatattgatacaaagcgttcgatgacacatcatccggtcatggaaatgattcgttcattgattgaagttattcaatctaattggcaagtgaatccaatgctacgcttattgaagactgatgtgttaacggcatcatatctaaaaagtgcatacttagttgatttacttgaaaattttgtacttgaacgtggtatatacggtaaacgttggttagatgatgagctatttaatgtcgaacattttagcaaaatggggcgtaaagcgcataaactgaccgaagatgaacgtaacacatttgaacaagtcgttaagttaaagaaagatgtcattgataaaattttacattttgaaaagcaaatgtcacaagcggaaactgtaaaagattttgcaactgctttttatgaaagtatggaatatttcgaactgccaaatcaattgatgacagagcgagatgaacttgatttaaatggtaatcatgaaaaggcggaggaaattgatcaaatatggaatggcttaattcaaatccttgatgacttagttctagtatttggagatgaaccaatgtcgatggaacgtttcttagaagtatttgatattggtttagaacaattagaatttgttatgattccgcaaacattggaccaagtaagtattggtacgatggatttggctaaagtcgataataagcaacatgtttacttagtaggtatgaatgatggaacgatgccacaaccagtaactgcgtcaagcttgattacagatgaagaaaagaaatactttgaacagcaggctaatgtcgagttaagtccaacatcagatattttacagatggatgaagcatttgtttgttatgttgctatgactagagctaagggagatgttacattttcttacagtctaatgggatcaagtggtgatgataaggagatcagcccatttttaaatcaaattcaatcattgttcaaccaattggaaattactaacattcctcaataccatgaagttaacccattgtcactaatgcaacatgctaagcaaaccaaaattacattatttgaagcattgcgtgcttggttatatgatgaaattgtggctgatagttggttagatgcttatcaagtaattagagatagcgatcatttaaatcaaggtttagattatttaatgtcagcattaacgtttgacaatgaaactgtaaaattaggtgaaacgttgtctaaagatttatatggtaaggaaatcaatgccagtgtatcccgttttgaaggttatcaacaatgcccatttaaacactatgcgtcacatggtctgaaactaaatgagcgaacgaagtatgaacttcaaaactttgatttaggtgatattttccattctgttttaaaatatatatctgaacgtattaatggcgattttaaacaattagacctgaaaaaaataagacaattaacgaatgaagcattggaagaaattttacctaaagttcagtttaatttattaaattcttcagcttactatcgttatttatcaagacgcattggcgctattgtagaaacaacactaagcgcattaaaatatcaaggcacgtattcaaagtttatgccaaaacattttgagacaagttttagaaggaaaccaagaacaaatgacgaattaattgcacaaacattaacgacaactcaaggtattccaattaatattagagggcaaattgaccgtatcgatacgtatacaaagaatgatacaagttttgttaatatcattgactataaatcctctgaaggtagtgcgacacttgatttaacgaaagtatattatggtatgcaaatgcaaatgatgacatacatggatatcgttttacaaaataaacaacgccttggattaacagatattgtgaaaccaggtggattattatacttccatgtacatgaacctagaattaaatttaaatcatggtctgatattgatgaagataaactagaacaagatttaattaaaaagtttaagttgagtggtttagttaatgcagaccaaactgttattgatgcattggatattcgtttagaacctaaattcacttcagatattgtaccagttggtttgaataaagatggctctttgagtaaacgaggcagccaagtggcagatgaagcaacgatttataaattcatccaacataacaaagagaattttatagaaacagcttcaaatattatggatggacatactgaagttgcaccattaaagtacaaacaaaaattgccatgtgctttttgtagttatcaatcggtatgtcatgtagatggcatgattgatagtaagcgatatcgaactgtagatgaaacaataaatccaattgaagcaattcaaaatattaacattaatgatgaatttgggggtgagcaatagatgacaattccagagaaaccacaaggcgtgatttggactgacgcgcaatggcaaagtatttacgcaactggacaagatgtacttgttgcagccgcggcaggttcaggtaaaacagctgtactagttgagcgtattatccaaaagattttacgtgatggcattgatgtcgatcgacttttagtcgtaacgtttacaaacttaagcgcacgtgaaatgaagcatcgtgtagaccaacgtattcaagaggcatcgattgctgatcctgcaaatgcacacttgaaaaaccaacgcatcaaaattcatcaagcacaaatatctacactccatagtttttgcttgaaattaattcaacagcattatgatgtattaaatattgacccgaactttagaacaagcagtgaagctgaaaatattttattattagaacaaacgatagatgaggtcatagaacaacattacgatatccttgatcctgcttttattgaattaacagagcaattgtcttcagatagaagtgatgatcagtttcgaatgattattaaacaattgtatttctttagcgttgcaaatccaaatcctacaaattggttggatcaattggtgacaccatacgaagaagaagcacaacaagcgcaacttattcaactactaacagacttatctaaagtatttatcacagctgcttatgatgctttaaataaggcgtatgatttgtttagtatgatggatagcgtcgataaacatttagctgttatagaagatgaacgacgtttaatggggcgtgttttagaaggtggctttattgatataccttatttaactggtcacgaatttggcgcgcgtttgcctaatgtaacagcgaaaattaaagaagcaaatgaaatgatggtcgatgccttagaagatgctaaacttcagtataaaaaatataaatcattaattgataaagtgaagagtgattacttttcaagagaagctgatgatttgaaagctgatatgcaacaattggcgccacgagtaaagtaccttgcgcgtattgtgaaagatgttatgtcagaattcaatcgaaaaaagcgtagcaaaaatattttggatttttctgattatgaacattttgcattacaaattttaactaatgaggatggttcgccttcagaaattgccgaatcataccgtcaacacttccaagaaatattggtcgatgagtatcaagatacgaaccgagttcaagagaaaatactatcttgcatcaaaacgggtgatgaacataatggtaatttatttatggttggagatgttaagcaatccatttataaatttagacaagctgatccaagtttatttattgaaaagtatcaacgctttactatagatggagatggcactggacgtcgaattgatttgtcgcaaaacttccgttctcgaaaagaagtactgtcaacgactaactatatattcaaacatatgatggatgaacaagtcggtgaagtaaaatatgatgaagcggcacagttgtattatggtgcaccatatgatgaatcggaccatccagtaaacttaaaagtccttgttgaagcggatcaagaacatagtgatttaactggtagtgaacaagaagcgcattttatagtagaacaagttaaagatatcttagaacatcaaaaagtttatgatatgaaaacaggaagctatagaagtgcgacatacaaggatatcgttattctagaacgcagctttggacaagctcgcaatttacaacaagcctttaaaaatgaagatattccattccatgtgaatagtcgtgaaggttactttgaacaaacagaagtccgcttagtattatcatttttaagagcgatagataatccattacaagatatttatttagttgggttaatgcgctccgttatatatcagttcaaagaagacgaattagctcaaattagaatattgagtccaaatgatgactacttctatcaatcgattgtaaattacattaatgacgaagcagcagatgcaattttagttgataaattaaaaatgtttttatcagatattcaaagttaccaacaatatagtaaagatcatccggtgtatcagttaattgataaattttataatgatcattatgttattcaatactttagtggacttattggtggacgtggacgacgtgcaaatctttatggtttatttaataaagctatcgagtttgagaattcaagttttagaggtttatatcaatttattcgttttatcgatgaattgattgaaagaggcaaagattttggtgaggaaaatgtagttggtccaaacgataatgtcgttagaatgatgacaattcatagtagtaaaggtctagagtttccatttgtcatttattctggattgtcaaaagattttaataaacgtgatttgaaacaaccagttattttaaatcagcaatttggtctcggaatggattattttgatgtggataaagaaatggcatttccatctttagcttcggttgcatatagagctgttgccgaaaaagaacttgtgtcagaagaaatgcgattagtctatgtagcattaacaagagcgaaagaacaactttatttaattggtagagtgaaaaatgataaatcattactagaactagagcaattgtctatttctggtgagcacattgctgtcaatgaacgattaacttcaccaaatccgttccatcttatttatagtattttatctaaacatcaatctgcgtcaattccagatgatttaaaatttgaaaaagatatagcacaaattgaagatagtagtcgtccgaatgtaaatatttcaattgtgtactttgaagatgtgtctacagaaaccattttagataatgatgaatatcgttcggttaatcaattagaaactatgcaaaatggtaatgaagatgttaaagcacaaattaaacaccaacttgattatcgatatccatatgtaaatgatactaaaaagccctcaaaacaatctgtttctgaattgaaaagacaatatgaaacagaagaaagtggcacaagttacgaacgagtaaggcaatatcgtatcggtttttcaacgtatgaacgacctaaatttctaagtgaacaaggtaaacgaaaagcgaatgaaattggtacgttaatgcatacagtgatgcaacatttaccattcaaaaaagaacgcatatctgaagttgagttacatcagtatatcgatggattaatcgataaacatattatcgaagcagatgcgaaaaaagatatccgtatggatgaaataatgacatttatcaatagtgagttatattcgattattgctgaagcagagcaagtttatcgtgaattaccgtttgtagttaaccaagcattagttgaccaattgccacaaggagacgaagacgtctcaattattcaaggtatgattgacttaatctttgttaaagatggtgtgcattattttgtagactataaaaccgatgcatttaatcgtcgccgtgggatgacagatgaagaaattggtacacaattaaaaaataaatataagatacagatgaaatattatcaaaatacgcttcaaacgattcttaataaagaagttaaaggttatttatacttcttcaaatttggtacattgcaactatagtattttgattttcaaaagaataaaaaataatttcgattaagtgcaaagtccttgtagcagaatgaacacaactcattttcaaaattgtcttacttatttatttgttatttgataacgaaaaaagttataatgtgaattaagataaagatgaggagttgagaatgaatgaaattcttatcattcaagtataatgacaaaacttcatatggcgttaaagtaaaacgcgaagatgctgtatgggatttaacacaagtatttgctgactttgcagaaggagatttccatcctaaaacattgttagctggtttacaacaaaatcatactttagattttcaagaacaagtacgtaaagcagttgtagcagcagaagatagcggcaaagctgaagactataaaatttcatttaatgacattgaatttttaccaccagtaacacctccgaataatgtgattgcttttggtagaaattacaaagatcatgcgaacgaattaaatcatgaagtggaaaaattatatgtatttacaaaagcagcgtcatctttaacaggagataatgcaacaattccaaatcataaagatattactgatcaattagattatgaaggtgaattaggtattgttattggtaagtctggtgaaaagattccaaaagcattagctttagattatgtttacggctatacaattattaacgatatcactgatcgcaaagcacaaagtgaacaagatcaagcatttttatcaaaaagtttaactggcggttgcccaatgggtccttatatcgttactaaagacgaactaccattacctgaaaatgtaaatattgttacaaaagttaacaatgaaattagacaagatggtaacactggcgaaatgattcttaaaattgatgaattaatagaagaaatttcaaaatatgttgcactacatccgggagatattattgcaactggtacaccagcaggcgttggtgcaggtatgcaaccacctaaatttttacaaccaggtgatgaagttaaagtgactattgataatattggaacgctgacaacttatatcgctaaataattatcatttaaaaagctaaccagtctttatatagattggttagttttttcttgcttttctaaaaaggtgttaaagataaattatttataatgttaccattttgagatgaaagtgaaatattgatattaagaagtagttgattattttacagcagattcacaatattctaataaggaataaaatgtcatgttcttcctctcaaatatagaagtgtggtagaatatatattcgtgtataatcaaatcatgattaaattacaagcaagtgggtattaatcccaagaagctttaatttaataatataaataattaaagtggggggaatcagtatgttacatttacatatattaagttgggtattagcgattattttatttatcgctacatacttaaacatttcaaaaaatcaaggcagatcaccatttttcaaaccgttgcacatgattttacgcttatttatgctgttgacgttaatttcaggattttggatattaattcagtcatttatgaatggcggggcaaatcatatgttgcttacattgaaaatgctgtgtggtgttgcagtagttggattgatggaagtgtcgattgctaaaagaaagagacatgaacaaagtcacacaatgttttggataacaattgcattaattatcatcacaatggtattaggtgtcattctaccgttagggcctatatcaaaattattcggtattggctaattgataagacatatagtatatgacataaggcatggacaattattagtccaagaccttatgtcttttttgattctaaaaatgttaaacataaaaaatggactggatagtagtaccagtccaacataattctaacctagacaattaagattagattgaatcgcatgattcatttatttagctttgtaaccaatcatattgattaaatctttagggtggctatatggtggtgcataagccacttcaaactcagttaactcatctacagttagctggttcatcattgccatcgatagtacatcaatacgtttatctgcaccttcttttcctactgcagctgctcttaaaatctgacggtttgaagtgtcataatatactcttaagtgtaaaggggaatttcctgggtaataattcgcgtgtgcaccttgagtgacttctaccattttatagtcaaattgctttagttcgtttggtttaacgccgacactcgcaaatgtataatcaaagaacttcacaatattgttgcctaagaagcctttgaattcaatagtgtcatttccagcaatttgttcggcaacaatacttgctgcacggtgagcgccccaagctaaaggaacactagccggtagatcgacatgtcgataatgtgatgttgcaatatcgcctattgcataaatgtttggaacatttgtttcaaatttatcgtttaccggtatgaaaccttttcgatcaagtttgatatttgaactttcgataaattttgaattggggtgagtaccgacaccttcaataatcatatcgtaatgttcaacttttcctgatttaaatgtaatttcatttccattgatagcattaatttcctcatttaaacggtatggaatctcccgcttatctaattcatcaagtataggttgattcatgtcggcatccattaatttatttatcttatcagatcgatgaattaaagtagggtgtaaaccacgttcataaagattttcaagaacttctaatgaaacataacctgcacctacaaccaatactttatcaacttgatttgctttgatgaattgatcgatagcatcagtgtcttctaaatttctaagtgtaaatgtaatatcactttcaaagccaaggctatttgcacttgcaccagggcttaaaatgagtttatcgtaagattcttcaaattgttcgtttgtctttctatttaatacagatacagtttgtctttcatcattgattgcaataacttcatgataagtttttactgtaatttgctttctatcataaaatttttcaggtgtatacgctaaagcatatcttctatcttcaacaacttcgccaatgacataaggcaatgcacaattagcaaagctcatatcacgatctttttcaaaaataataatgtcactttctttatctaaacgtcgaatttggctggcacatgttgcaccgccagcgactgctccgactacgactattttgggcatcgtaacttacctcctattgttttaaaatattataaaatgattagttataaattaacagtaatatctaatatttaaattaaagaaatcattcaaatatcgaccaatgccatcttcattattgttgaatgtaatattgttcgctacatctttaagttcttgcaaaccattttccatagcaacaccgtgacgcgcgtactcaatcatttcaatatcattatcttcatcaccgaatgcaataatattatttcggtcaatatttaaaaattgtctaacttgctcaatgcctcttgctttattaataccaagttttacaatttcaatgacagggaatggtgcgccccagcgtcgatgctcaatatgatcggcataaaaatgagtaagcatatttttgatttcaggtattttactttcttcggcttcaattaaaattgaggtaggggattctttcaagtggacaagtaaattaccagtttgaattcttggattacccattgaaaaaccttcaaataatcttggatcatgattgttaatgaaaacataatctttcacttctgctataatattcgatacttgatattgttgtaatccttgaataatgttttgtgcgatgcctaaatctaaaatttcatggcaagttttgaagtttttatctttagggtgatgtacgtaagcgccattaaaattaacaattggtgtcgttaaatttaattcatgataatacatttgacttgcacgataaggtctgccagtcgcaatcataatttggtgtccacgttgttgtaattcatttaatacttgtttagtatatgatgaaatttctttgttatcgtttaataatgttccgtctaagtctagacatattaaatgtggttgcatatctctctcctcataagttgcttagttcatatagatacatcatagcattttattggcgttttgtcggatatttgatatattatgaataatatgacattaaagaggtgatatggatggaagaggcattgaaagatagtatcttaggtgcattagaaatggtaattgaccctgaattaggaattgatatcgttaatttgggtttagtatacaaagtgaatgttgatgatgaaggcgtatgtacagttgatatgactttaacatcaatgggatgtccaatgggacctcaaattattgatcaagttaaaacagtattagcagagattcctgaaattcaggatactgaagtgaatatcgtatggagtccaccttggacaaaagatatgatgtcacgttacgctaagattgcacttggtgtgagctaacataaacttgcattgcctgtagaatttcttttcgaaattctctgtgtttgggcccgcagtcaatataacattgtagagtataattcattgtgaataagctcccttcaaagtagacattgaaaaatgaaaattttgaagggagccttatttatgttctagtttctgattttattttgaaaatttatatctaacttgtttcaaaaaatatgaattaagacagtgacttgcacttccaagagtgcacaattcattttctagttgaatattttattgaaaatttttataataaattgaatttatattacagttatattacaatacataatacttcatagtttttaagttgccgagttgcattacaaattggatttcgaagtaagaatcatcattggtaatttttttaatttaacagtattttagtcaatatgattttgatgatgtcgtaattcaataatatacatatgcatttcaatattcttttaaacagcataactaaatttaattaagcatctaagaagaacagttttaaaagggaagaatgcaaaaatgaacaaaacaaagggttttacaaagtataagaaaatgagatatattccagggctcgatggtttgagggcaatcgctgttctaggaattattatttaccacttaaataagcaatggttgacaggtggctttttaggtgtggatacattttttgtgatctctggttatttaattacaagcttattactcaaagagtatgatgacacaggtatcattaaattgaaaagcttttggatacgtcgtttaaaacgtttattaccagcagtcatagttttattaatggttgtagggacagcaaccttattattaaaatcagataatatcattagggttaaacatgatattattgctgcgatattttatgtatcaaactggtggtatatagcaaaagatgttaattattttgagcaattttcatttatgccattaaagcatttatggtctttagcaattgaagaacagttttacatatttttcccagttattttggttacattattgttaacaattaaaaagcgatacaaaataggatttattttttggggagtatcaataatttctttagggttaatgatgtttatctatagtattaatggggatcattcacgagtgtattttggtacagatactagattacagacattgttactgggtgttattttagcttttttatggccaccgtttaaattgaaaaatgatccacctaaagttgtaaaatatgttattgatagcataggtagtttatcatttatagtacttatattattatttttcattattaatgatgagacgaattggatatatgatggtggtttctatttaatatccatattaacgttatttattattgctagtgtcgttcatccatctacatggatagcgaagatattttcaaatccagtgttagtatttatcgggaaaaggtcttatagtttatatttatggcattttgcagtaattagtttcgtacatagttactatgtagacggacagatacctgtatatgtgtactttatagatataagtttaacaattatatttgcagagctatcatatcgctttatagaaactccatttagaaaagaaggtattaaagctttaaattggcgaccttcttatatactacaatttataagaatggcaattgtagtaaccttgttaattccatttatgttgattttagtaggtgcattcaataaatatggtaaagacattattggagaaaaagcgaatagctttgataccacaattgaagataattatttaatgcggatagcaccaattgataacatacacattgatggcttagtaagtgagaagaaaaaggaatcttccgacgtatataataatattaaacctcttttaatcggtgattcagtaatggttgatatcggtgagtcatttaagtcatcagttcctaagtctagaattgatggaaaagtagggcgtcaattgtatcaaaccttacctttagttaaagcgaattattcacaatataaaaaatcatctgatcaagtcgtattagaattaggtacaaatggcgactttactgtcaaacagctcgacgatttacttaatcaatttggaaaagccaagatttatttagttaatacacgtgttccaagaatttatgaggcaaatgtaaatcgattattagctgacgcggcgaaacgaaagtccaatgtcacattaattgattggtataagcgatcacaaggacatagtgaatattttgcaccagacggtgtacatttagagtacaaaggagtcctagctttaaaagatgaaatattaaaagcacttaaaaagaaataacatatgtttaataagtctagttaatgtgtaacgtaacattagctagatttttttattcaaaaaaatatttacaaatattaggaaatttaagtgtaaaagagttgataaatgattatattgggactataatataattaaggtcaaagaaagtcaaagtcaaaagtgcaacttgaccaactctacaaattagaggtgaaattatatggatataaataaaatgacatatgctgttcaaagtgctttacaacaagcagttgaactgagtcagcaacataaattacaaaatatagaaattgaggcaattttaagcgctgccttaaatgaaagtgaaagcttatataaaagtattttagaacgagcaaatattgaggtagatcaattaaacaaagcttatgaagacaaactaaacacgtatgcatctgtagaaggtgacaatatacaatatggtcaatatattagccaacaagcaaaccaattgataactaaggctgaatcatacatgaaagaatatgaagatgaatatatttcaatggagcatattttacgttcggcaatggacattgatcaaacaacaaaacattatataaataataaagtagaagttatcaaagaaattattaaaaaagtaagagggggaaatcacgtgacatcacaaaatccagaagttaattacgaagcattagctaaatatggccgcgacttagtagaagaagttagacaaggtaaaatggatcctgttataggaagagatgaagaaattcgaaatacgattcgtattttaagtcgtaaaactaaaaacaaccctgtgctcattggtgaaccaggtgttggtaaaactgcaattgttgaaggattagcgcaacgtatagttaagaaagatgtgccagaatcattattagataaaactgtttttgagttagatttaagcgcattagtagcgggcgctaaatatcgtggtgaatttgaagagagattaaaagcagtcctaaaagaagttaaagagtctgatggtagaattatattatttattgatgaaatccatatgcttgtaggtgctggtaaaacagatggtgccatggatgcaggcaacatgctaaaaccaatgttagcacgaggagagttacattgtattggtgcaacaactttaaatgaatatcgagaatatattgaaaaagattcggcattagagcgtcgtttccaaaaagtagcagttagtgagcctgatgttgaagatacaatttcaattttacgtggtttaaaagaacgatatgaagtgtatcatggtgtgcgtattcaagatagagccttagttgctgccgctgaattgtctgatcgttacatcactgatcgttttttaccagataaagcgattgatttagttgaccaagcatgtgcaacaattcgtacggaaatgggatcaaatccaactgaattggatcaagttaatagacgtgtcatgcaattagaaattgaagaaagcgcacttaaaaatgaatctgacaatgcgagcaaacagagattacaagaactacaagaagagcttgccaatgaaaaagagaaacaagcagcacttcaatctcgtgtagaatcagaaaaagaaaaaatagcaaatttacaagaaaaacgtgcgcaactagatgaaagtagacaagcgttggaagatgcacaaacaaataacaatttagaaaaagctgctgaactacaatatggaacaattcctcaattggaaaaagaacttagagaattagaggataatttccaagatgagcaaggtgaagatacagatcgaatgattcgtgaagttgtaacagacgaagaaattggcgatattgtcagccaatggacaggcataccagtttcaaaattagttgaaacagaacgtgaaaaattacttcacttaagtgacatcttgcataaacgtgttgtaggtcaagataaagcggttgacctggtttcagatgcagtagttagagcaagagcaggtattaaagatccaaacagacctattggtagtttcttattcctaggtccaactggagtaggtaaaactgaattagctaaatcattagctgcatcattatttgattctgaaaaacatatgattcgtattgatatgagtgaatatatggaaaaacatgcagtatcaagattgataggggcacctccaggatatattggacatgatgaagggggtcaattaactgaagcggttcgtcgtaatccatactcagttattttattagatgaggttgaaaaagcgcatactgacgtctttaatgtattattgcaaattttagatgaaggccgtttaactgattctaaaggacgtagcgttgattttaaaaatactattattattatgacaagtaatattggatctcaagttttattagaaaacgtaaaagagactggtgaaattacagaatcaacagaaaaagctgttatgacaagtttaaatgcatatttcaaaccagaaattttgaatcgtatggatgatatcgtattatttaaaccattatctattgatgacatgagtatgattgtagataaaatcttaacgcaattaaatataagattattagaacaacgaatctcaattgaagtttctgatgatgctaaagcttggctaggtcaagaagcttatgaacctcaatacggtgcaagaccattaaaacgttttgtacaacgccaaattgaaacaccattagcacgtatgatgattaaagagggattcccagaaggtacaacgattaaagttaatttaaattcagacaataacttaacgtttaatgttgaaaaaattcatgaataaaattgaaccaagaatgtgatgattaatcgcattcttggttttttagatttgaaatttattataattgttcattggcaatatactttttaaatgatttaataaacaccaatatttctgggctttcttttttgctgtatatatatgtaaatgaaataggtgcttgtaaaattttcgtgttaataaccgaaatattgtaatcactatttgttgttatataaagaggcaggaatgatataccttgattcatttcgattaatttaattgaagtatgcacatcattgatagatagaaattgtgctttttcataaatatttaaaatattatttttaagtgatgaccaatattctggatggttatcacttattattttgtatttttcaaataaagatgcctcagttagaagatgattattctctttattgggagcaatcaatacaattttaccttcgcatactttttcagaatgaacttctcttagtttaggttgatttctgctaatcccgatgtcatacgtatgattattaatatctttttcaatattttcatttttgacatgaagagaaacatcgataaaaggatgctcgttaaagaaagattttaaaaatttgggcataatgaatgtcgcgatatatgaagacacgacaacatttaatttcgattgaaacatcgtttttttaagttggatatgtttgatgccactttcatattgttcaataaaactttgcgcaattggaagaaatgtatgaccatcttcagtcaagataatttgatttttataagtttcaaatagtttcacattgagatgctgttctaaatttttaatttgcttatgtatagaaggtatagtgagattaatttcttcactagctaatcgatagtttaacgtcttcgctaaaatgacaaatgtatagtaccaatctaaattcatgaacttacctctttcaaaaaagttaataattcattagataatatttaatttttattgcataaaaataatattaatattatatcagaggttatcgagggggtgaagtaatatgattcgaattcaagataatacaataagggatggtatgcaacaaagtaatgttcgaaaaagtctaattataaaaaaagaagtattgaaacaaattaacaagttaaatataaattctgttgaagtaggcatgtgtacaactatcgaggatgaatttaatattcatcaattcagagacattttaagtcctgaaaaagaattagtagtattgactaggcttaatgaaaaagaaataaaaaaaatagtcaaattgaaaattcataatttagtggtaaaaatactattgccaatatctgacttgcatataaaagaaaagcttaatttttcaaataaatattatattcagaaaatcaaagactgcttggatatattaaagaaagataaaaaaggagtagatatttgttttgaagatggaacaaggacttctagagaaaaattgaaagaatacatggaaattatttcaaaatatcaagttagaacagttacatttgcggacactgtaggatgttcgacaccattagaatacggagatatttttaattactttgtaaaaaaatattctaacataattttttctgctcattgtcataacgatctagggttggctactgcaaatacattagctgcaattttaaatggtgcaaagcaaatagaaactacatttttgggaattggtgagagagcgggtaatgctcctattgaggaaataattactattttgacaaaaaaacaaatagaaagtacggaattcactttacccgacgtatataaaactagtattaatatttctaaaattctcgattttcaaatatcagaaaacaaacctataattggtgaaaatatatttaaacatgaatcaggaattcatcaagatggtactaaaaaaaatataaatatgtatcaatatttagttcctagtgatttaggattgaaaaattcacaagttgttcagtttccaataagtaatatttctagtaagaaaatcttgcacaataaatttaaatcaatagttaacactgaagaaattgatgaaaatatttctttctataaacttgtgaacaagttttcacctgaagtagcacctgaagatacagtggatttacttcagataataaaaaggaggagtaaagatggaaattttaaatgattctgtaaaaagttttgaaaaactttatttacaattacaagatggttttccagtgattgttcctactgatactaattataatttatgtagtttacctaacaacgatctttgtatcgataaaatatttgaatataaaaagcgatcgaaagataagccattatcattatttattgataagccagaggattggaaattgtatggagataatcaaaatacggaaatagttgataaactagttgaaatattttggcctggaccattaaatattattttaaaaaataaaacaagctataattatatgctcaataattcagatagtatagctataggatgtgtacaaaataaaacgatgagaagatttatttcatatattaattcacctatagcaattacttcagcaaatatatctggaactgccgatgatattttaataactgaaaatgaagcaattaagcacatgggcgaaaatgtaagatatatgctaagaagtcaaaataaaactaactataaaacatctagtacgattattaaagtgacagataataaaattgaattattaagagaaggagatataaagtttgaagaaataaaagaaagactaggtacaggtattatttatgaataagttaatacttgggatttatttataccgaattttttcacgagcatacttttatttaccgtttttattaatttactttttgattcaaggttattccataatacaattagaaatattaatggcgtcttatggcattgcagcatttttattctctctatacaaagagaagtgttttaaaatttgtaacttaaaagattctaataaattagttgttagtgaaatattcaaaatcatcggtttattgttgttattatatcaaaatcaatatttaattttagtagtggcacaaatattattagggttaagttactcaatgatggcgggtgttgataccgcaataattaaaagaaatataacaaatgagaaatacgtacaaaataagtcaaatagctatatgttcctatcattattaatttcagggattataggtagttatctttatggaataaatattaaatggcctataataatgactggtatattttcaattctaacaattataattattcgatgcacattagttgaaaatagggaattaaatttaataggagaaacaaagggaaagataaagaaatttctaccagaagagaagttttggatattgcattattcttttttaagagcgttaatattaggattttttataggatttattccaattaatatatataatgatttaaaactgaataatttacaatttatttcagtattaacttgttacacagttatgggttttgtatcttcacgttatttaactaaatacttgaattataagtttgtgtcagaaatttgtttagtaatatttttaataatatatacatatcaaagtttcatagcagttactatttctatgatatttttaggtatttcttcagggttaactcgtccacaaactataaataaactttctagcagtagtaacttaagagtgatgcttaattatgcagaaacgttatattttatttttaatatcgcatttttacttatgggtggttacttatatacaataggaactattcaatacttaatattatttatttcgttattaatttttatatatttaataataatattttattttacaaggagagagcaacatgaaaataaaaactgaatttaaagggaacaatataccatatgaatacgcagcaggtgcagatgtgagtgattctattaacgggaatccaattaagtcatttccatttgaagtaattgaattaccggaagggactaaatatcttgcttggtctttaattgactatgatgcaattcctgtatgtggctttgcttggattcattggagtgtagctaatgtaagtgttagtggcaattcaatttctataaaagcagatttatcaagaacaaagggcgactatgtacaaggtaaaaatagctttactagtgggttgttggctgaagatttttcagaaatagaaaatcactatgtaggacctacaccacctgatcaagatcatcaatatgaattaacagtttatgcgttagatcattctttaaatttgaagaatgggttctacttgaatgaatttttaaaagaagtaaatcaacataaaattgatcaaacaagtattaaccttataggaagaaaaatttaatactaaatatctcatcaatataaaattgttcaattaaaagtacaaagaaacaaaggttttaatttatatattaggtacggcgttcgctataatgcaaagaagtaattaaatttaagaaatgtaaacttagttattgtaatgtgaatttatttgaaaaaatagaaagtattaacaattatagcttttacattaattaaaatttatttttaaaaacaagtaaacaatttacatacttataatttttgaaacttttcaatttgtgttatattgattttgtaagatactttaactcacaaaggagagagattatatgaaattaaaatcatttataactgtaactttggcactgggcatgatcgcaacgactggcgctactgtggcaggtaatgaggtatctgcagcagaaaaggacaaactaccggcaactcaaaaagctaaagaaatgcaaaatgttccatatacaattgcagtagatggcattatggctttcaatcaatcttacttaaatttaccaaaagatagccaattatcatatttagatttaggaaataaagttaaagctttgttatatgatgaacgcggtgtaacacctgagaagattcgaaatgcaaaatctgccgtttacacgattacttggaaagatggtagtaaaaaagaagtggatcttaagaaagatagctacacagcaaacttgtttgattcaaattcaattaaacaaattgatattaatgtaaaaactaaataaacacttaaaattatcaaattcaacatgaagcatttaattttacagtgatgattataaaataattgccttgatacaaagattactcgtaaatgacatctttgtattaaggctttttctaaatttaaaagtgatgggttagaggtcattgagctttaaaatattcaaaatacaaaacattaatggccaaaaataaaagccgcctttatctgggcagcttcaataataagaaagacatatttcattttatactaaatagttattgtgatgaatctttcggcggtttaattactgcagcaaaaattgctgtgaaaatcgtgaacaatactgccatgataattggattcactacatttaagctgtctccacctactaggctattaagtacaaagttaaccatttgcattaataataatgcccaaaagaatgttacgaggtgtttcatgtcattctacctccactttaattatatatattttattttaagtgaaagttagaaatttgtatagtaacatctcatatattttgaccatattatacagtttaaataaatgattttatctgaatggctattctaaattaagcgcattaaaaccaatttcatactgaaatttgacgataataaagcattaaaattttattaactagtcaatattcctacctctgacttgagtttaaaaagtaatctatgttaaattaatacctggtattaaaaattttattaagaaggtgttcaactatgaacgtgggtattaaaggttttggtgcatatgcgccagaaaagattattgacaatgcctattttgagcaatttttagatacatctgatgaatggatttctaagatgactggaattaaagaaagacattgggcagatgatgatcaagatacttcagatttagcatatgaagcaagtttaaaagcaatcgctgacgctggtattcagcccgaagatatagatatgataattgttgccacagcaactggagatatgccatttccaactgtcgcaaatatgttgcaagaacgtttagggacgggcaaagttgcctctatggatcaacttgcagcatgttctggatttatgtattcaatgattacagctaaacaatatgttcaatctggagattatcataacattttagttgtcggtgcagataaattatctaaaataacagatttaactgaccgttctactgcagttctatttggagatggtgcaggtgcggttatcatcggtgaagtttcagatggcagaggtattataagttatgaaatgggttctgatggcacaggtggtaaacatttatatttagataaagatactggtaaactgaaaatgaatggtcgagaagtatttaaatttgctgttagaattatgggtgatgcatcaacacgtgtagttgaaaaagcgaatttaacatcagatgatatagatttatttattcctcatcaagctaatattagaattatggaatcagctagagaacgcttaggtatttcaaaagacaaaatgagtgtttctgtaaataaatatggaaatacttcagctgcgtcaatacctttaagtatcgatcaagaattaaaaaatggtaaaatcaaagatgatgatacaattgttcttgtcggattcggtggcggcctaacttggggcgcaatgacaataaaatggggaaaataggaggataacgaatgagtcaaaataaaagagtagttattacaggtatgggagccctttctccaatcggtaatgatgtcaaaacaacatgggagaatgctctaaaaggcgtaaatggtatcgataaaattacacgtatcgatactgaaccttatagcgttcacttagcaggagaacttaaaaactttaatattgaagatcatatcgacaaaaaagaagcgcgtcgtatggatagatttactcaatatgcaattgtagcagctagagaggctgttaaagatgcgcaattagatatcaatgaaaatactgcagatcgaatcggtgtatggattggttctggtatcggtggtatggaaacatttgaaattgcacataaacaattaatggataaaggcccaagacgtgtgagtccatttttcgtaccaatgttaattcctgatatggcaactgggcaagtatcaattgacttaggtgcaaaaggaccaaatggtgcaacagttacagcatgtgcaacaggtacaaattcaatcggagaagcatttaaaattgtgcaacgcggtgatgcagatgcaatgattactggtggtacagaagcaccaattactcatatggcaattgctggtttcagtgcaagtcgagcgctttctacaaatgatgacattgaaacagcatgtcgtccattccaagaaggtagagatggttttgttatgggtgaaggtgctggtattttagtaattgaatctttagaatcagcacaagctcgaggtgccaatatttatgctgagatagttggctatggtactacaggtgatgcttatcatattacagcgccagctccagaaggtgaaggtggttctagagcaatgcaagcagctatggatgatgctggtattgaacctaaagatgtacaatacttaaatgcccatggtacaagtactcctgttggtgacttaaatgaagttaaagctattaaaaatacatttggtgaagcagctaaacacttaaaagttagctcaacaaaatcaatgactggtcacttacttggtgcaacaggtggaattgaagcaatcttctcagcgctttcaattaaagactctaaagtcgcaccgacaattcatgcggtaacaccagatccagaatgtgatttggatattgttccaaatgaagcgcaagaccttgatattacttatgcaatgagtaatagcttaggattcggtggacataacgcagtattagtattcaagaaatttgaagcataactataaaaatcttcagtaacgttgttttagttactgaagattttttcagtttctttatactaagatgagcgacagcacaatcgtcataataaaatataaaatatttattaataataaggggattatccatgtagaaacaaagtaatgctctttttttacctcttgtgggttgaaaaatggatcatcagagatagacttcttctttttcgaagatgacatttgatactttaatcttctaaaaccataacttgtcgcatcaaaaatgccttcttgtacaagtaaaatcaaaaatatgctaataaaaataattaatgaaacataaaacaatatatttaaatatgtaatgatagtatggctattaaaaagccatataataaacgttaatattggcgttattagtgccattccaagccattttttcaacatttgatcactcccacttatagaaaactcttacgcatagtttacattaaaatcagacattgaggaatgatttttaatttcttcagctttattgaaattctaaaatcaatcattcttcattagtttaaagcaaaaaaatattgatatatagtaaatattgtatatataatattagttaagatttcagaaaattttgaagggaatggaaatttagaaatcggaatttgttagaggaggggattagatggggaaatatattttcaaacgatttatttatatgcttatttctttatttattattattacaattacatttttcttaatgaaattaatgccaggttcgccatttaacgatgctaaattaaatgctgaacaaaaagaaattttaaatgaaaaatatggattaaatgatcctgtagctacgcagtatttacattatttaaaaaatgttgttacaggcgattttggtaattcattccagtatcataatcaacctgtgtgggatttgattaaaccgagactactaccttcttttgaaatgggtcttacagcaatgttcatcggtgtgatactgggacttattttaggtgttgcagcagctactaaacaaaattcttgggttgactatacaactacagttatttcagttattgcagtatctgtaccatcttttgtacttgctgtacttttacaatatgtatttgcagttaaattaagatggttcccagtagctggatgggaaggtttttcgaccgcggtattaccgtcacttgcattatctgcagctgttttagcaactgtcgccagatacataagagcagagatgatagaggtattaagttcagactatattttattagcgagagctaaaggtaattcgacaatgcgtgtactttttggacatgcacttagaaatgctttaattccaattattacaattatcgttcccatgttagcaagtattttaacaggcactttaacaattgaaaatatttttggagttcctggattaggggatcaattcgtacgttcaattacaacaaatgatttctcagtaatcatggcaatcacactattatttagcacactgtttatcgtttctatttttattgtagatattttgtacggtgtgatagatccacgaattcgtgttcaaggaggtaaaaaataatggctgaaaataaaaacaatttgtcgattaacgacgatcattctaatgcagctatgacgcatacctctgacgctatcgcatcatctgattttattattagagaattagatttgaatcaggaacctgaaatgcaacgagaaagcaaaaacttttggcaagatgcttgggctcagttaaaacgaaataagttagctgttgtcggtatgataggtttaattatcattgtaatatttgcttttatcggtccagttataaataaacatgattatgctgaacaaaatgtagaacatagaaatcttccggcaaaaatacctgtattagacaaagttccatttttaccttttgatggtaaagatgcagatggcaaggatgcttataaagcagcaaatgctaaagaaaattattggtttggtactgatcagttgggtcgagatttatggacaagaacatggaaaggtgctcaaatttcattgtttatcggtgttgttgcagcgatgttagatatttttattggtgttgtatatggtgcgatttctggattcttcggtggacgtgtcgatacgattatgcaacgtatacttgaagtcatagcatctattccgaatttaattgtcgtaattttatttgtattaatttttgaaccatccatttggacaattatattggctatgtctatcacaggctggttaggcatgagcagagttgtacgtggagaatttttaaaattaaaaaatcaagagtttgtcatggcttcgaaaacattgggggcttcaaaattcaaattgatatttaagcatattttacctaatacattaggtgctatcgtggttacatcaatgtttacagtacctagtgctattttcttcgaagcatttttaagtttcattggtataggtgtacccgcacctcaaacatcgttagggtcattagtaaatgatgggcgcgcaatgttattaatttatccacatgaattatttataccagcaatgattttaagtttattaattctattcttttacttatttagtgatggattacgtgatgcatttgatccgaaaatgcgtaaataaaaagggggcatagcatatgactgaaagaatattagaagtaaatgatttgcatgtttcctttgatattacagcaggggaagtgcaggcagtgagaggcgtagatttttatttgaacaaaggggaaacattggcaattgttggtgaatcaggttcaggtaaatctgtaacaacaaaagcaattacaaaattattccaaggggacacaggaagaattaaaaagggagaaattttatttttaggggaagatttagcaaaaaaacctgaaaatgagttgattaaattacgtggcaaagatatttcaatgatctttcaagatccaatgacatctttaaacccaacgatgcaaattggtaaacaagtcatggaaccattaattaagcacaaaaattatagtaaagcacaagctaaaaagcgcgcattggaaatactaaatcttgtaggtttaccaaatgcagaaaaaagatttaaagcatatcctcatcaattttcaggtggacaaaggcaaagaattgttattgcaaccgcattagcttgtgaacctaaagtgctcattgctgatgaaccaacgactgcattagacgtaacgatgcaggcacaaattttagatttaatgaaagaactacaacaaaaaatcgatacagcaattatttttataacgcatgatttaggggttgttgcgaatattgctgatagagtggcagttatgtatggtggtcaaatggttgaaacaggagatgttaacgaaatattttatgatccaaagcatccatatacatggggattattatcgtcaatgcctgatttatcaacaacaaatgacacaccattactagcgattcctggagcgccacctgatttattacacccacctaaaggtgatgcatttgcgagacgtagtcaatatgcattagatattgattttaaagtagaaccaccgtggtttaaagtttcaccgacacattttgtgaaatcttggttattagacgcacgtgcaccaaaagttgaactacccgagctggtaaaacaacgtatgaaaccgatgcctaataattatgaaaaaccactcaaggtagaaagggtgtcgttcaatgaaaaatgatgaagtgctattatctattaaaaatttaaagcaatattttaacgcaggaaagaaaaacgaagtgagagcgattgaaaatatttcgtttgatatatacaaaggggaaacattaggtttagtaggagaatcggggtgtggtaaatctacaactggtaaatcaattattaaacttaatgatattacaagtggagaaattttgtatgagggtattgatatacaaaagattcgtaaacgtaaagatttgcttaaatttaataaaaagatacagatgatttttcaagacccatatgcgtctttaaatcctaggttaaaagtaatggatatagtagctgaaggtattgatatccatcatttagcaactgataagcgtgaccgaaaaaaacgtgtctatgatttacttgaaactgttggattaagtaaagaacatgccaatcgctatcctcatgaattttcaggtggacaacgccaacgtattggaattgcccgtgcattagccgttgaaccagaattcattatcgcggacgaaccaatatcggcattggatgtttcaatccaagctcaagtagttaatttattattaaaattacaacgtgaaagagggattacgttcctatttatagctcatgatctatcaatggtgaagtatatttcagatcgtattgcagtcatgcattttgggaaaatagttgaaattggaccggcagaagaaatttatcaaaatccattacacgattatactaagtctttattatcagccattccacaacctgatcctgaatcagaacgcagtcgcaaacgatttagttatattgatgatgaagcaaataatcatttaagacaattacatgaaattagaccgaatcactttgtctttagtactgaagaagaagcggcacaactacgagaaaataaattggtgacacaaaattaaggggaagggggaaatgcaatgacgagaaaatttagaacacttattttaattttgattgctacaattgcattaagtggttgtgctaatgacgatggtatttattcagataaaggtcaagtattcagaaaaattttgtcatcagacttaacatcccttgatacatcattaataacggatgaaatatcttctgaagtgactgcgcaaacattcgaaggtttatacacattaggaaaaggtgacaaaccggtgttaggtgttgcgaaagcttttcctgaaaagagtaaagatggtaaaactttaaaggttaaattaagaagcgatgctaaatggagcaatggtgacaaagtgactgcacaagactttgtttatgcttggagaaaaacagttgaccctaaaacaggttctgaatttgcatacattatgggggacattaaaaatgcgagtgatattagtactggtaagaaacctgtagagcaattaggtatcaaagcattaaatgatgaaacattacaaattgaattagaaaagccggttccatatattaatcaattattagcacttaatacctttgcacctcaaaatgaaaaagttgccaaaaaatatggtaaaaattacggtacggcagctgatagagcggtatacaatggtccatttaaagttgatgattggaaacaagaagataaaaccttactatctaaaaatcagtattattgggataaaaagaatgtaaaattagataaagtgaattataaagttattaaagacttacaagccggtgcatcattgtatgatactgaatcagtagatgacgcagttattactgcagatcaagtaaataaatataaagacaacaaaggattaaactttgtgttaacgactgggacattttttgtaaaaatgaatgaaaaacaatatcctgattttaaaaacaaaaatttaagattggctatcgcacaagcaatagataaaaaaggatacgttgattcagtgaaaaacaatggctcaattccttccgatacactaacagccaaaggaattgcgaaagcgcctaatggcaaagattatgcgagtaccatgaattcgcctttaaaatataatcctaaagaagcaagagcacactgggacaaagctaaaaaagagttaggtaaaaatgaagtgacattttcaatgaacacagaagatacaccagatgcaaaaatatctgctgaatatatcaaatcgcaagttgagaaaaatttaccaggagttactttgaaaattaagcaattaccgtttaaacaaagagtatcactagaactgagtaacaattttgaagcatcacttagtggttggtctgcagattaccctgatcctatggcttatttagaaacaatgaccacaggtagcgcacaaaataatacagactggggtaataaagaatatgatcaattacttaaagtagcaagaaccaaattggcacttcaaccgaacgaacgatatgaaaacttgaaaaaagcagaagaaatgttcctaggagatgcaccggtagcaccaatttatcaaaaaggtgttgcacatttaacaaatcctcaagtaaaaggattaatttaccataaatttggtccaaataactcacttaaacatgtatatattgataaatcgatagataaagaaacaggtaagaagaaaaaataatatgctttgtaaattaggctggagacatatctccagtctttttgtgttggataaaaactttgggaataaaaatttaaaataagtcgttttttaaattactgaaattgattaaatgcataaataactgaatattctaaaaataaacttgtaataattttttctatgagtaaactaaaaagaaaaaattagattgaaagtaggaggcatatgtatggggaagctaattaaatatatttcaatacttcttattgtcgttttagtgttgagtgcttgcggaaaaagcagtaataaagatgaaggagtaaaagatgctactaaaacggaaacctcaaaacataaaggtggtaccttaaatgtagcattaacagcaccgccaagtggtgtttattcttcgttattaaatagtacacatgcagattctgtagttgagggatattttaacgaaagcttattagcaactgataaaaaaatacgtcctaaggcatatattgcttcatggaaggacatcgagccggctaagaaaatagaatttaaaattaaaaaaggtattaaatggcatgatggtaatgaattgaaaattgatgattggatttattcaattgaagtcttagctaacaaggactacgaaggtgcttattatccaagtgtagaaaatatccaaggtgcgaaagattatcatgaaggaaaaactgatcatattagcggattgaagaaaatagatgactacactatgcaggttacatttgataaaaaacaagaaaattacttaacaggatttattactggacctttattaagtaaaaaatatttatcagatgtaccaattaaagatttagcgaaatcagataaaatccgaaaatatcctattggtattggaccgtataaagttaagaaaatcgttccaggtgaggctgttcaactcgttaaatttgatgattattggcaaggtaagcctgcactagacaaaatcaatttaaaagttattgatcaagcgcaaattattaaggcaatggaaaaaggcgatattgatgttgcgaatgatgctaccggtgcaatggcaaaagatgctaagtcatctaatgctggtctcaaggtattatctgcgccaagcttagactacggtttaataggattcgtatctcatgattacgataaaaaagctaataaaactggtaaagtgagaccaaaatatgaagacaaagaattacgtaaagcaatgctttatgcaattgatagagaaaaatggatcaaagcgtttttcaatggttacgctagtgaaatcaatagttttgtaccatctatgcattggatagcagccaatcctaaggacctaaatgattacaaatatgatcctgaaaaagctaaaaaaatcttagataagttaggttataaagatagagatggtgacggatttagagaagatcctaaaggtaataaatttgagattaactttaaacattattcaggttctaatcctacttttgaaccaagaactgctgcgataaaagatttctgggaaaaagttggcttgaaaacaaatgtgaagttagtagaattcggtaaatataatgaagacttagcaaatgcatctaaagatatggaagtgtacttcagatcatgggcaggaggtacagatccagatccatcagatttataccacactgatagacctcaaaatgaaatgagaacagttttaccaaaatcagatcaatatttagatgatgcattagacttcgaaaaagtaggcattgatgaaaagaaacgtaaagatatttatgttaaatggcaaaaatatatgaatgatgagttacctggattaccaatgttccaaggtaaatcgataactattgttaacgataaagtacgaaacttagacattgaaattggaactgatcaaagtttatataatttaactaaagaagcttagtaatgtaacctcgacgattttgtcgaggtttacttatatggggggatgttatgaataatgtattgttagaggttaaagatttagaaacatcattaaaaataaataatgaatggttagcaactgttgaaaatatttcttttgaattatctaaaggagaagttttgggtatagtaggggaatctggttgcggtaagtccatattaagtaagtcaattattaaattattaccagaaaagatatctaaactaagtaatggagaagttatatttgatggtaaacgaatcgatacgctcaatgagaagcaattgctagatattcgaggaaatgatattgctatgatttttcaagaacctatgactgctttaaatcctgtatttaccataaaaaatcaacttgtggaatctataaaatcacataaaaaaatttctaaaaaagaagcaaataaattagcaaaagatttactaaaaaaagttggaattgctagacaagatgaaatattaaatagctatcctcatcaattatctggtggtatgagacaaagagtaatgattgcaatggccatttcatgttctcctaaattattaattgctgatgaacctacaacagcattggatgtcacgattcaagcgcaaatattagacttattaaaagaattgcaaaaggaaacgcaaatggcaattatgatgattacacatgatttgagtgtagttgctgagttttgcgataaagtcttagttatgtatgcaggtcaaattgtagaatttggaggcataaaagaaatactacacaatccgaaacatccttatacccaaaaattattatcaacaattccaaaacttaaagaagagcagaaacgacttgaaacgatagaaggaattgtgccatcaatccaagcatttcacgttaataagtgcagatttgcaaatagatgtaacaaaaaactggatatttgtaataatcaatctcctaaaatgcatgtttgtgaagatgtcattgtacgttgtcatttgtacaaaaatgaatataaggagatataagaatggaaaatattttagaagtcaaccaaataaaaaaatactacaaaattaaaactggattattacaaaaaactcagtacgttaaagctgttgatgacgtatcgttttcaataaaaaaaggacaaacttttggattagtaggagaatcgggttgtggtaagtcaacgttaggtaaagtgattatcaggcttgaagatgcaacttcaggctcaataattgttaatggtgaagatataacaagattacaaggtaaaaaactcagaaaatcacgacaacaatatcagatgatatttcaagatccgtatgcatcattgaatccgatgcaaatggttggagatatcatttcagaacctattttaaattataaaaaattgccaaaagaagaaataaaaaaagaagtactatatttattaaaatgtgttggcctaagtgaagatgcatattataaatatgcacatgaattttcaggtggacagagacaaagagtgggaattgcaagagcattggctttgcgtccgagtttaattgttgctgatgagcctgtaagtgcattagatgtatctgttcaatctcaagtactgaatttattaaaagatttacaagaacaatttaacttaagctatttatttatcgcacatgatttaagtgtagtaaaacatataagtgatgtcattggagttatgtatttaggtcatatagttgaaatcgcatctgataaagaaatttatgaaaatcccaaacatccatatacaaaagcgttgatttcatcaataccacaaattgataaacataataacaatagaattatattaaaaggagaattaccttcgccaagtaatccgccgcaaggttgtccttttcatacaagatgtccaattgctcaagatatgtgcaaaaaaagtatgccagaattaaaggacattggtaatgaacatcaagttgcttgtttctacgtagataaagtaggtgatttaaatgattaaattaatacttaaaagattagggttaatgatcccgttactaattttaatctcaatagttgtattttcattagcaatcatacaaccaggagatccattttcagatctacaaaacggtaaaataaaacaagaagcaataaatgcacaaagggaaaaattaggtctcaacgactcaataccacatcaatacattagatgggtcaatcatgttatacacggtgatttaggggagtcaatcaaatataaaaggccggtaattgatgttattgaggaaagaattccaaatacaatattactcggtgctatgtcattaattattacttatattatctcatttgctttaggaataacgtcaggtagatattcttacagtttgacggattatactgtgcaaatatttaattatttgatgttagccattccatcttttattgcgggagtatttgcaatttttattttttcttttgaattacaatggttcccgtttcaaggttctgttgatattaaccttaaagaaggtacttttgaatattatatgagtaaaatatatcacacatttttacctgcattcactttaggtttattatctactgctggttatattcaatatttacgtaatgatattattgaaaattctaaaaaagattatgtattgacggcaaggtcaaaaggattatctatgaataaaatttataataaacatatattgagaaattctctaatacctattattacatttttaggtgctgatattgtaagtattttaggtggagccgtgattacggagactatcttttcatataacggtatcggtaaattatttttagaatcggtaataggccaagactatccattaatgatggcattaacgttatttttctcatttttaggtttactgggtaatttgatttctgatattacttatggatttatagatccaagaattagaagtaactaggggggattagaatgcaaaataagtcaaaatcgccttttaaaattgcattttctaaatttattcataataaaattgcaatgttatcggttatttttttattaatcataactattgtatcaattatagcgccattaatagctccttttccagtgaaccaacaagatttattaaatataaaaggtgaaatgacagcacaaaacattcttggtacagactctggtggtagggataactttagtcgtttgttatatgcaggtcgtatttcattatccattggaattacatctacaataggaatgcttttgattggaattacagttggagtgatttctggttattttggaggtattgttgatacattattaatgagaataaccgaatttgttatgttatttccatttttaatatttgcaattgtattaaatgctgcacttggagataaaattaaaaatccttatggatctgccataattcttgttctagttattatcgtattaagttggggaggtattgcaagacttgttcgtggtaaagtacttcaagaaaaagaaaatgaatactttttggcagcaaaatcaattggtacacccacatataaaattattttgaaacatcttttgccgaatatattaagtgtagttatcgtacaagcaacattgttatttgccggtatgattgtagtggaatcaggattgagctttttaggattcggaattagtaaagcaataccatcttggggtaatatgttgagtgatgctcaagaaggggatgttataagtggtaaaccgtggatatggatgccacctgctataatgattacattaactatattaagtataaactttgtaggggaagggattaaagatgcttttaatcctagaggtagacgttaaataataaaagaggcactagttaattctagtacctctttattttatctcttacgtcctaaacccatcgctttttccatttttttgacagttttaaatgaaactttgtgtgctttatctctaccttgatctaaaatatcatcaagtttatctgagttatagaaactttcgtatttttcttggaattctactaaaaatgctttaactatttcagcaaggtcacctttaaatttaccataaccttcgccctcatattttgcctcaatatctttaattggcatgtctgttaatccagcgtatattgaaattaaatttgttatacctggcttgttgtcacgatcaaatttaataataccatctgaatcagttactgcgcttttaatttttttagctgcaacattcggctcgtctaataatgaaatgaagtttttagcattatcatcactcttactcatttttcttgttgggtcttgtaaactcatgacacgtccaccaactttaggcatacgaatttcaggtttcacaagcacatcattatagcgactattaaatctatctacaaggttacgagtcaattcgatatgctgcttttggtcatctccaactggaacgatattagtattgtaaagaacaatatcagctgccattaaaggtggatatgttaatagaccagcaggtataccttcaactgctttctgagctttatctttgtattgcgtcatacgctctaattctccaacagaagcaatcgtagttaacatccatcctgcttgtacgtgtgcagggacttcagattgtatgaacaatgttgctttgtctggatctataccagaagctaaataaatcgctgctaattgtctggtctgtttacgtaattttaaacgatcttgtggcattgtaattgcatgttgatctacgatacagaaataacaatcatagtcattttgcacatcaacaaattgttttagtgcgccaatataatttccaatagtaggaattccactaggttggatgcctgaaaataatgtctccatttaaatgcctactttcttagtaatattttaataattatcattataacagtatttcttaaaaatgtaagatgtgttagaatatacgtataacttactactaacaaagggattaataatcttttttataagtgtagaaacttatctgaaaaattaggtttttctcatttaattttaatgttagatagttataataaatagtaacgattaagaattttagaaaaaaatgttttttcttgatctataactaaattttaagcaatgaattttattcattcaaataggagagtgagatgtatggtaacattatttacttcaccaagttgcacatcttgccgtaaagcgaaagcatggttacaagaacatgacattccgtatacggagcgtaatattttttctgaacatttaacaattgatgaaattaagcaaatattaaaaatgactgaagacggtactgatgaaatcatttctacacgttctaaaacataccaaaaattaaatgttgatattgattcactaccattacaagacttatattcaatcattcaagataatcctggcttattacgtcgtccaattattttagataataaacgactacaagttggttataatgaggacgagattcgacgtttcttacctagaaaagttcgtacgttccaattacaagaagcacaacgtatggttgactaataaccatttaactatgtgtcatactttactaaaagatatgtcaagcaacactatttctatagtgttgcttttttggttttaattttacaataattgcttagtatcttttaaatcaaatgtgcaattgttaatatagctctatattagagtgttttggatgaaacatttgctatgataaggtaaaattaaattaagaaagtgctttaatgctttaactgtataaatcatttaaatagttttgctacaacgaatatgttattataagttaccaaaatattttagagaaagaaatcaaacaaataaattgtattttgtttgatgctttaatacaatgtggatactattcatcgactgtaaggagtgagatgatatgagaatagaacgagtagatgatacaactgtaaaattgtttataacatatagcgatatcgaggcccgtggatttagtcgtgaagatttatggacaaatcgcaaacgtggcgaagaattcttttggtcaatgatggatgaaattaacgaagaagaagattttgttgtagaaggtccattatggattcaagtacatgcctttgaaaaaggtgtcgaagtcacaatttctaaatctaaaaatgaagatatgatgaatatgtctgatgatgatgcaactgatcaatttgatgaacaagttcaagaattgttagctcaaacattagaaggtgaagatcaattagaagaattattcgagcaacgaacaaaagaaaaagaagctcaaggttctaaacgtcaaaagtcttcagcacgtaaaaatacaagaacaatcattgtgaaatttaacgatttagaagatgttattaattatgcatatcatagcaatccaataactacagagtttgaagatttgttatatatggttgatggtacttattattatgctgtatattttgatagtcatgttgatcaagaagtcattaatgatagttacagtcaattgcttgaatttgcttatccaacagacagaacagaagtttatttaaatgactatgctaaaataattatgagtcataacgtaacagctcaagttcgacgttattttccagagacaactgaataacgatattaattaagcaacgcactatgaaaggagactctttggagtctctttttttattgatttcaaaagctgaaaaagtaatagtagttaaacttacgtgtaatattttgaggtgaagatatgttagtagctttaaatgaagaaaaggaacgcgtattagcaactactgcattgagaaagacacaatatttttgtccggtgtgtggcaagcaagttattttaaagcgtgggctcaaagtaattagtcattttgcacataaacatttagcggaacaaaaatgttttaataatgaaacgattaaacattataaaagtaaattgattttagcacagatgatacagcaacaaggatgtaaagtagagatagagccattttaaaagaaataaaacaaattccggatattttgattaataataaatatgttattgagctacagtattcgccaattccttataaacagattcttcaacgaacggaaggtttaaagaaaatgggatataaagtaagttggttattaaatgatgttgattattgtcataataaagtgaagttcaatcattttcaaagtatgtttattaatccattcactcgaaaacttcatacgttcaatttagagaaaaaacaaataatgatgtttcaacaaatacaatatttaggcgggcacaaatatgtcgctgaaaaaagaaatgccaaaattagtgagttgtttaatgaggcgccttgtgattatcatgctgtttataaattatcaaagttcgcaattaatcaatatatcaaatattgtcgctggcaaaattctgttttagaacccactttaagtgcaatgtatcaattacagttaactgatcaagaagtagtgcacaattatggttatatttttccagagcaaatttatattaaaaatcatcctattgagtggcaattacaagttgatttatggttaaagaatggaaaaagcaaattagtaaatgacaatcttaattattttaaactgaaaaaatttattgttgctctagaaagtaaaacagcaattatagaaaaacttattaacaattatttaaatatttgttcagataaaggtaatgacgtgcaaattttgttctaaaatgagaaaattatatcaattatattttattaggaggtttactacatatgagtcaacaattatcgagagaagaacaggaacgtaaatatcctgaatatacatgggacttaacaacaattttcaaagatgatgaagcttttgaggctgcatttaaagaagttgaaaatgagttaggcaaagaagaacaatttaaaggacacattggtgatagtgctgagacattatacaatgcgttagaattagaagatacattaggtactaaattagaaaaagtatatgtatacgcgcacctaaaacaagaccaagatacaacgaacgacaagtatactggtatggagtcaagagcacatcaattaattattaaatttagctcggcatggagtttcttagtgccagagattttacaaattgatgaagataaaattcaatcatttgtaaattcatatgataaattacaaaaattcgcatttgatttgaagttgattaatgaaaaacgtcctcatattttagatgctgaaactgaaaagttattaacagaagcgcaggacgcgttatcaacgccatcaaatgtatacggtatgtttagcaacgctgatttagtatttgaagatgcgatagataaagatggaaatgcacacccgttaacacaaggtacatttattaagtatttagaaacagatgatcgcaaactaagagaaagtgcttttagaaatgtatataaagcatatggtgctcataataatacgcttggcgctacgctagcaggtgaagtgaagaaaaatgtatttaatgctcgtacacacaattacaaaactgcaagagaaaaagcattgagtaataatcatattccagaaaatgtatatgacaatttagtaaaaactgtacataaatatttaccattgctacatagatatactgaattgcgcaaagaattgctaggtttagatgacttgaaaatgtatgatttatatacaccattaattaaagatattaagtttgaaatgccttatgaagaagctaaagagtggatgttaaaagcattagaaccaatgggtgaagaatatttaaatgtagttaaagaaggcttaaacaatcgttgggtcgatgtctatgagaataaaggtaaacgttcaggtggctattcatcaggtgcacatttaactaatccatttattctacttaactggtctaatactatttcagacttatacacattagttcatgaatttgggcattcagcacatagttacttcagtagaaaattccaaccgtcaaattctagtgactacactatttttgtcgctgaagttgcatcaacttgtaacgaagcacttttaagtgattatatggataaacatcttgatgatgaaaaacgcttattattattaaaccaagaattagaacgtttcagagctacattattccgacaaacaatgttcgcagaatttgagcataaaattcatgcaattgaagaagcaggtgaaccattaacgccaactagaatgaatgaagaatatgccaaattaaataaattatacttcggtgattctgtagaaactgatgaagatattagtaaggaatggtcacgtattccacacttctatatgaattattatgtatatcaatacgcaactggttacagtgcagctcaaagcttaagtcatcaaattttaacagaaggtaagccagcagtagatagatatattaatgaattcttgaaaaaaggtagctcaaattatccaattgagatattaaaaaatgctggtgtagatatgacaacacctgaaccaattgaacaagcttgtgaagtttttgaacaaaaattgaacgcttttgaaaaattaatgaaagcttagtactattgtattcgcttacattatgaacagattgtgacaatttaaattaagtactattaaaaggttgaaatggtagagatagcatgttatattatgaacatgaaattaatcacataacaaacatacccctttgtttgaagtgaaaaatttctcccatcccctttgtttagcgtcgtgtattcagacacgacgtttttttatgttcttttttaataagagggaagtgaagttgtataaaaatgtattaaatatgcactttttatacattaacgattcatatatgtctattatgtaccaaatttataatttgtataattttcgaactggttaaattcgaaaaatatcactaatatatttagatcgatgtgtaacattacgttctaataatttaatgttgcaaaattaagagtcagtaaaaagacctcgttacatttatggtgtacgaggtctttaatttatttattttgatttgattttaggcattttagatttccagaaatcgccatctggatatttaagtttttcaattttttgttgaatggctaacttctttaactctttgtttaaaagtttttctggccattcataaatagtaagtaattcttccatcgttacaagttgttgttgctgtatataagtttctaatttaggaggaagattcttttcgataggtttacccatcaattcattaattatataagtatagatgtgatatgggtataatccttcgacttttaaaccttcttcatgaacatcttcactaaagaaaacgagagaaggggcttgttcgatttccatttctcttgcaatatgcaaatcaattttcaagctttcggttagtttacttttttgtaagtcgtctttaaatacttctaaatcaatacctgcattttgaatacagtcacaaatcattgattctgtaataatatctcttttaggtatgatttcattttgcattaaatgtataaatcgttcggcacgtacacgaccttgtaactcagctgctttataagctagggcgatgttatcaaagttggatgtactttgagcttggcatttcgttaatacttttaacgaaggatttaatatatgtctgatacgtatatattgattatattcaattcttaatttggataagattgctgataatttgaagcaatcggagctaaatggatcgaaaaatgaataaatttcgattttacttacaggtgatagattgatatcttcacgactcttattttccattattcgtaattctccagccatgtttattcacctacaattaattttaggaattcaccatatgattagcagttaatcttaagcgctcaaataaataatctccaacaccttgtggaaacgcagcgcgattaattgctgtctgcatattttctaaccatgcatctctttcaaattcagtgattgtaaaatctatatgtctttttcttagcataggatgtccgtgttcttcggtataaatgtttggaccgcccaaaaactgtgttaaaaattgtttttgtttacgacttgtttctgcaaaatctcctggaaacaggtgattaagtcgttcatctttttctacaagggtgtaaaaataatcaatcatatcgtataacgcttctttaccaatgatgtcatatggtgttgttgtcatttaatcacccattttcaaaaatttactgttacgaacttaagttaatatataactaatataacatgattttaaacatttgaaagaaatatgcatatttgccaatttaatttatattgtttgaaagtgtttcttttttcttgaaaaaacgttgaactttatttaaaggttgatgatgttcgaggtttagttcgtttaataaagattggaacttttgtaaaccttgattatagtctttaacttcgaactctaactcataatccgtagtatcgaaatactcacttttatctaaaaccagtaaatcacctttatatttagtttcttggcgatatgtcgttaatgcaccaagtattgataaagttgtatcttttacaccaaactgttcaactataatttgacgaatgtcatctggaagattgtcgtttgaaataatcaagttcatctctggtttaatgtcgacgatatagttgtattctaatagaccaacctttgctggtgtctttaaagtcatttcatattgattgtctttaactcttatgcgtagtgcagagcgatgttcctttaatttgaaatcgggtgtatcaatatagtaattgacttgcttaaaaagcacactgtctttaaaatatttctcttgcaatttattatagattgatgcagttatcatttgtttaaattctatttcatgatttgttgccatgatatgtatacacctcgtatcaaattcaatttatcttaactatattatgaatgacaaagttgaattttaaaagtaatttcctttatctattatcaatgttaatttgaccattaaaaatagtgttcgtaagtgttttgtattattgaattgtgttaaaatgttatggaataagaggaggattaagcatgcgtttatatattaatgaaattaaaattaaagatgacatactttattgttatacagaagattctattaaaggattatctgaagtaggacaaatgctcgttgatagtgataattatgcctttgcgtatacattagatgatggtaaagcgtatgcttatctcattttcgtacaagaaacatggacgatgttgcatgaaaacatgactaaaaaaattattatcaatgatgaactagaattgactgaattccaccaagaacttacttatattttagacaacataaaagggaataataattatggtaaggaatttgttgcaaccgttgaagaaacattcgacattgaataaagcggggtgaagcactatgaatcaatgggatcagttcttaacaccttataagcaagcggttgatgagttgaaagtgaaacttaaaggcatgcgcaaacaatatgaagttggtgaacaagcgtcgccaatagaatttgttactggtcgtgttaaaccaatcgctagtattatagataaggcaaacaaacgacaaataccatttgataggttaagagaagaaatgtacgatatcgctggtttaagaatgatgtgccaatttgttgaagatattgatgttgtcgtcaatattttaagacaaagaaaagattttaaagtaattgaagaacgagattatattcgtaacactaaagaaagtggttaccgctcgtatcatgtcattattgaatatccaattgaaacattacaaggccaaaaatttatattggctgagattcagattcgtacattagcaatgaatttctgggcaacgattgaacatactttacgatataaatatgatggtgcttatccggatgaaattcaacatcgtttggaaagagcggcagaagcagcgtatttacttgatgaagagatgtctgaaattaaagatgaaattcaggaagctcaaaaatattacacgcaaaaacgttctaaaaaacatgaaaatgattaacgaggtgttataaatcatgcgttatacaattttaactaaaggtgactccaagtctaatgccttaaagcataaaatgatgaactatatgaaagattttcgcatgattgaggatagtgaaaatcctgaaattgttatttcagttggtggtgacggtacattactacaagcattccatcagtatagccacatgttatcaaaagtggcatttgttggagttcatacaggtcatttaggattttatgcggattggttacctcatgaagttgaaaaattaatcatcgaaattaataattcagagtttcaggtcattgaatatccattgcttgaaattattatgagatacaacgacaacggctatgaaacaaggtatttagcattaaatgaagcaacgatgaaaactgaaaatggctcaacacttgttgtggatgttaacttaagagggaaacactttgagcgatttagaggcgatggattatgtgtatcaacaccttcgggttcaacggcttataacaaagcgctaggtggcgcactgatacatccttcacttgaagcaatgcaaattacagaaattgcctcgataaataatcgtgtgtttagaacggtaggatcaccacttgtattaccaaagcatcatacatgtttaatatcaccagttaatcatgataccattagaatgacgatagatcatgttagtatcaaacataaaaatgttaattcaatacaataccgtgtagcaaatgaaaaagtgaggtttgcacgttttagaccattcccattctggaaacgtgtgcacgattctttcatatcaagtgatgaagaacgatgaaatttaagtatcatatatcacaacaagaaactgttaaaacttttttagcacgacatgatttttctaagaagacagtgagcgccattaaaaataatggcgctttaattgttaatgatgaaccagtcacagtgcgtaagcaattaatgacaaatgatatattagaaattcatttaccgcgagaaataccgagtgttaatttaataccttatgctcgtaagctagaagtattgtatgaagatgcttttatcatcatagttactaaaccaaacaatcaaaattgtacgccttcgagagaacatcctcatgaaagtttaatcgaacaagtactatatcattgtcaggaacatggtgaaaatattaacccacatattgttacgcgtctagatcgtaatacaactggtattgtgatattcgctaaatatggacatatccatcatttattttctaaagtaaacttgaaaaaaatatatacttgccttgtatatggtaaaacccatacatctggtattattgaagctaatattagacggtcaaaggataggattataactagagaagttgcctcggatggtaaatacgctaaaacatcttatgaagtaataaatcagaatgataaatacagtttatgcaaagttcatttgcatacgggacgtacacatcaaattcgtgtacattttcaacatattgggcatccaattgtgggagattctttgtatgatggttttcatgacaaaattcagggtcaagtactgcaatgtacgcaaatatattttgttcatccaatcaataagaacaatatttatattacaattgattataagcaattacttaaattattcaatcaactctaattcacacagggggtgtaagtatgtcaatgaacacagatgaaaaagagcgtgttcaagaggaattatacgaccaaactttattagatcaatatttagaaaatgatgatattgatcaatttagagatgaatttctagcattacacacatatgaacaaagtgagtattttgaagatactaccgatgaaaatagacaaaagatttttcaatatttatcacctgaagaagttgcaaatttctttgatcaattagatattgatgacgatgaatatgagttgctatttgataagatgaatgcgacatacgcaagtcacatattagaagaaatgtcatacgacaatgcagtagatattttaaatgagttgactaaaccaaaagttgctagtcttttaacattgatgaataaagatgacgcgaatgaaatcaaagcattacttcactatgatgaggatacggccggcggtattatgacgacggagtatttatcacttaaagcgcatacgcctgttaaagaagcattattattggtcaaagcgcaagcaccagacgcagaaacaatatatgttatatttgtcgttgatgatgatggtaaattagtaggtgttttatcgctaagagatttaattgtagctgaaaatgatgcttatattgaagatattatgaatgaacgtgtcattagtgtgaatgtagcagacgaccaagaagatgttgctcaagttatgagagactatgatttcatggctgtacctgttatagattaccaagaacatttgcttggtatcatcacgattgatgatattttagacgttatggatgaagaggctagtgaagactactctcgtttagccggggtatcagatatcgattcgactaatgattcaatcattaaaacagcattaaaacgtttaccatggttgattattttaacatttttaggaatgattactgcgacaattttagggagattcgaaaaaacattagaaaatgtagcgctactcgcagcgtttattcctattattagtggtatgtcaggaaattcaggtacacaatctttagccgtttcagttcgtaacattacgacaggggaaattaatgagcaaagtaaatttagaattgcattaagagaagcaggaagtggtgtattatcgggtgttgtatgttcaacaatattatttacaattattgttgcaatatatcatcagccacttttagcattaatcgttgcaggaagtttaacttgtgcgatgacggtggggacgtttgtaggttcgatgattccattattgatgaataaattaaatatcgatccagcagtggctagtggaccatttattacaacaattaatgatattattagtatgttgatttattttggtttagctacatcatttatggcttacttaatttaaggaggagttatggagtttttatctttagttattgttgttttagcagcgtttttaactccaataattgtcaatcgattaaatattaatttcttgccagttgttgttgcagaaattttgatggggattgtgattggaaattcatttctaaatatagtagaaagggattcaattctaaatattttatcaacgttaggctttatctttttaatgtttttaagtggtttagaaattgattttaaagcttttaaaaaagataaacgcgcacgtcaaggacaaaatgatgatgaatcctcaattccagggcatcttaatctagcgttaactgtatttgcatttattatgattatttcgattcttttagcgtatgtatttaaatggcttggattagtggatgatgtgttattaatggtcattatcatttcaactatttccttaggcgtagttgttccaactttaaaagaaatgaatattatgagaacaactatagggcaatttatcctattagtagcagtacttgcggacttagtaactatgattttattaacggtctatggcgcaatcaatggtcaaggcggcagtacaatatggttaataggtatattagttgttttcacagcaatttcatatattttaggtgttcaatttaaaagaatgtcatttttacaaaaattgatggatggtacgacgcaaatcggtattcgtgcggtatttgcattaataatattattagtagccctagcagagggagttggcgcagaaaatatattaggtgcattcttagcaggtgtcgttgtttcattattaaatccagatgaagaaatggttgaaaagttagactcatttggttatgggttctttattcctattttctttataatggttggtgtagatttaaacataccttcattaattaaagaaccgaaattactaattatcataccgattttaatcgttgcatttatcatttcaaaattaattccagtcatgtttattcgacgttggtttgatatgaaaacaacgattgcatcagcatttttattaacatcaacattatcgctcgtgatagctgcagccaaaatttcagaaagattaaatgctatttcagctgaaacgtcaggtatattaattttaagcgcagtcattacatgtgtattcgttccgattattttcaaaaaactgtttccagttccagatgagtttaaccgtaaaattgaagttagtttaattggtaaaaatcaattaacgattcctatagcgcaaaatttaacatctcagttatatgacgtgacattatattatcgcaaagacttgagtgatcgtcgtcaattgtcagatgatatcacgatgatagaaattgctgattatgaacaagatgttttagaacgactaggtctgtttgaccgagacatagttgtttgtgctacgaatgacgatgatattaaccgaaaagttgctaaattagccaaagcacatcaagttgagcgtgtcatttgcagacttgaaagcacaacggacgatacagagttagttgattcaggtattgaaattttcagtagctacttaagtaataaaatcttattaaaaggtttaattgaaacacctaacatgttgaatttattaagtaatgttgaaacgtcactatatgaaattcaaatgttaaattataaatatgaaaatattcaattacgtaatttcccattcggaggagacatcatcttcgtgcgtattatccgtaataatgagtcgattgttccgcatggagatacacaattgcgatatggagatcgcttaattgttaccggtgctaaagaatacgttgatgaattgaagcaagagttagaattttatttttaacaataatgatattaaaatgcagacgtattttagtacgacgtaaaattaatgattttaaaatgctagtatgtatatgattttgataaataaatgctttttacgtaaatcaagtttgatacagaaaggactaaatcaaacatttatcgttgtaatacgtttaaataactttattaaaaagtcataatagtgttaaaatgtattgacgaataaaaagttagttaaaactgggattagatattctatccgttaaattaattattataaggagttatcttacatgttaaatcttgaaaacaaaacatatgtcatcatgggaatcgctaataagcgtagtattgcttttggtgtcgctaaagttttagatcaattaggtgctaaattagtatttacttaccgtaaagaacgtagccgtaaagagcttgaaaaattattagaacaattaaatcaaccagaagcgcacttatatcaaattgatgttcaaagcgatgaagaggttattaatggttttgagcaaattggtaaagatgttggcaatattgatggtgtatatcattcaatcgcatttgctaatatggaagacttacgcggacgcttttctgaaacttcacgtgaaggcttcttgttagctcaagacattagttcttactcattaacaattgtggctcatgaagctaaaaaattaatgccagaaggtggtagcattgttgcaacaacatatttaggtggcgaattcgcagttcaaaactataatgtgatgggtgttgctaaagcgagcttagaagcaaatgttaaatatttagcattagacttaggtccagataatattcgcgttaatgcaatttcagctggtccaatccgtacattaagtgcaaaaggtgtgggtggtttcaatacaattcttaaagaaatcgaagagcgtgcacctttaaaacgtaatgttgatcaagtagaagtaggtaaaactgcggcttacttattaagtgatttatcaagtggcgttacaggtgaaaatattcatgtagatagcggattccacgcaattaaataatatcattcaacagctttgttcacgttattatatatgtgagcaaagcttttttgcttttataataatcggactgatggaaaattatttgatatttcatttgactgattttttatgcacaaaaaaatcgcctcaaaagctgtagtttcaacttttgatgcgatagtatcttatattcttaaaagacatccacagaattagtccttaacattactgtttgctttatcaataatgcgttggcggtatttgaaaatattactaacaaccgttttaagtacagcatataatggcactgcaatcagaactaatgtaaagccacctaaatctcctgctgctaaaataacaacgataattgttaaaggatggatacttaaagatttacccattacatttggtgtaatgatattaccttcaagttgatgtgcaattaatgtaatgatacaaacccatataaatgtagtaggactatctataataccgagtattgctgcaggtgcaaatgataaccatgaacctaagaaaggaattaagtttgcgacaccagcaaatagtactaataaaggaatatatggtaagtcaataattgaataaccgatatataagaatatacctaaaataacactgacagttacttgaccttgaatgtaagattttaatgtaaagtttaaatcagttaataaatctacgaaaaatactttacgttcacctttgaaaaatttagcaacagctgggataaatttttcatggtcttttaacatataaattaagaagaatggaaccataatcaataagaagatggttgaaattaatgatgtaatgtactgtaatgaattagataaaatattagtaacgccatcacccattgatttaaccatatttgtaattctacttgttacatcttcaggtaatttatccatttgagctagtgcgaatttaataatttgctctgcttctttttgtagggcaggtgtctgactaattaaattgttgatatttgaaatgatgattggtgcaacaaacgcaacaattaagccgataatagcaaacaaagctaacatgattgttgttatactagcccatcttggaaaaccgactttttcaagtaagttttgaaaaggtagacagatataaaataaaaaaccactaattaaaaatggaagaaatacagaaccgatgattgtagctattggagtaaatacttcgtgcacttccataaatagtttgatgagaatgaacagcataatcagagcgatgccagttcggaaccaaaccttgtttaacataaacgatgttcctcctatttttctaaacttagttattatttagtatatcctaaatagcagtgcttaaaaaggttaatattttttaaatatacttaaattaaccattcactttctattttaagatatttactttcaatagtttgtgagacttttcaatgactcgtaagtctgcaattggatcaaacagcaccagtttatatgaataacttattttaatattaaacgtgtttaaatagtgaaatgatcatattaatatttataagaatattctgaaaaatatattgaagtgtctcgtgcttaatcgtataatatttttatgtttaaacaatagggggaatcttatgattgaaaaattagtaacctttttaaatgaggttgtttggagtaagccattagtttatggtttgctaattactggtgtgctatttacattgcgtatgcgattttttcaagttagacattttaaagaaatgattcgattaatgtttcaaggagagaagtctcctaatggtatttcaagttttcaagcgatagccatgtctttagcaggcagggttggtacaggtaatattgtcggtgtatctactgcaatatttataggaggacctggtgcagtattttggatgtggattactgcgtttttaggtgcaagtagtgcttttattgaatctacacttggtcaaatattcaagagagttgaaaataatgaataccgtggtggaccagcgtattatattgaatatggtattggtggtaaatttggtaaaatttacggaattatctttgctattgttacgattatctcagtaggtctattgcttcctggtgtgcaatctaacgctatagcaagttctatgcataatgcgattcatgttccacaatggttaatgggtggtattgttgtagttattttgggattaattatttttggtggtgtacgtagtattgccaatgttgcaacagccgttgtaccatttatggcaattatttacatactgatggctgtcattatcatttgtatcaatatacaagaagtgccagcgttatttgcattaattttcaaatcagcatttggattacaatctgcttttggtggtatcgttggcgcaatgatagagattggtgttaaacgtggattatattcaaatgaggctggtcaaggtacaggtccacacgcagcagcggcagcagaagtatcacatccaagtaaacaaggtctagtacaagcattttcagtttatattgatacattatttgtatgtactgcaactgctctgattatacttatttctggtacatataatgtgactgatggtacggttaatgcgaatggcacaccgcatttaattaaagatggcggtatttatgttgaaaatgcaacaggtaaagattattcaggtactgcgatgtatgcacaagccggcattgataaagcgttccatggcagtggttatcaatttgatcctactttctctggcgtaggttcgtactttattgcatttgctttattcttctttgcatttactacaattttgtcgtactactacattacagaaacaaatgttgcttatttaacgcgtaatcaaaataatcaagtttcatcgatatttattaatattgctcgtgtgattattttgttcgctacattttacggtgcagttaaaacagctgatgtagcatgggcattcggtgatttaggtgtaggtctaatggcttggttaaatatcattgcgatttggattttacataagcctgccgtaaatgctttaaaagattatgaaattcaaaagaaacgtttaggcaacggttataatgcagtttatcaacctgatccgaataaattacctaatgctgtcttttggttgaagacgtatccagaacgtttaaaacaagcacgtgccaaaaagtaatctacttttgtttatagtatatgtagtgatcatttgataaaaaagaaaagtattgagaattttaggtgctcagaaatttgaattttaaaaatatagtgtctcttggtacaataacaatacaactactaggggcacttttttatgtcagaatttaaaactggtaagattaataaacatgttttatatagtaatattttaaatagagatgtcacgttaagtatttatttaccagaatcttataatcaacttgttaaatataatgtcattctttgctttgacggattagattttttacgtttcgggagaatacaacgtacatatgaatcgttaatcaaagaagcgcgtattgatgatgcgatcattgttggattccattatgaagacgttgataagcgtagagaggaatttcatccacaaggaagtcgttctcatttaactattcaatcagtcggtaaagaaatattgccatttattgactcgacgttttctacactgaaagtaggtaatgcaaggttattagtaggggatagtttagcgggtagtattgccttattaacggcgttgacctatccaacgatttttagtcgtgtagcaatgttaagtccacattcagatgaaaaagtattagataagctaaatcaatgtgcaaataaagaacaattgacaatttggcatgtcattggtctagatgaaaaagattttactttaccaacaaatggtaagcgtgccgatttcttaacaccgaatagagaattagctgaacaaattaagaaatataatataacttattattacgatgaatttgatggtggtcaccaatggaaagattggaaaccattgctgtcagatatattattgtattttttaagtaaaaacacagatgatcaactttatgaataatttacattagtagatttagtatgaattgtcttcatatagtctggtctataatataatttataaaagattttactgtttaatttaatttaaatttgacgaaattgcaaaagatgtataatgaattatttttaatgtaacggttttcaaagaaatttgatataatagcaataggttaaacaaaggaggaattcagatgattttaggattagcattaattccatcaaagtcatttcaagaagcggtggattcttaccgtaaaagatatgataaacagtattcacgaattaaaccacatgtgacaattaaagcgccatttgaaattaaagatggtgatttagattctgtcattgaacaggttagagctcgtattaatggtataccagcagtagaagttcatgctacaaaagcttctagcttcaaaccaacgaacaatgtgatttactttaaagttgcgaagacggacgacttagaagaattgtttaatcgctttaatggagaagatttctatggagaagctgaacatgtttttgtgccacactttacaatagcacaaggactatctagccaagaattcgaagatatttttggtcaagtagcattagctggggtagaccataaagaaattatcgatgaattaactttgttacgttttgacgatgacgaagataaatggaaagttattgaaacgtttaaattagcttaagtaacataatagtattgttaatcgtagtatgtttgaattaataagaaaatggtcatttttattgaatgtaataaaaatgaccattttctttattttaaaatacgttttaaccttacttagctttttctctatttactataaagtagcttccataaaatacagctaagactaaaaagattaatgccgagaaataaaatgtattgtttaaattgttggtaaattgtgtaattaatccgccaaataatggccctatcattgagccgaatccttggatactattaaaaacaccccaagtttcttcttgttcatctgatttgataaatcgtgccataaaggtattccatgctggtaataagatgccatacattagaccgatagctaaagcgataatccacaagatgtgaatattaacaatcatagatagagtaaaaattaatatcatgtataaaataaatccgcttagaataacaccatacataaagtttctgctgcggttatctattagtttcgataaaaatagcatcgaaactgcacagccgataccaccaataatgattgcaacagtatattcaattgtgcttacgttaataaccttagtagcatatgttggtaatataggaactagggcagcaattgcggcaccttgtaaaagaataccagggaacaacaataaatggcgctttgtcacatcaacaatttgtctcaattgagctttaactggacgagtattataatttgttaactttacatcgacaaaataatataatatccatgcaattaaaacgactaaagacatcatgaaggcaaagcgtgttgggtgcactttgataagtagattcataaaaaccatacctaccaataggcctaacaaccatgaaaaataaacatagcccatttgtttgccacgtttatcttcttcaacactggataacataatgacccaaataggactaactgcaataccgagcatcatagcactaaatatgattacaaaaggtgatgctggaaaccaaataactaaaaataaacttgtaaatgctaaaataaatccagtcgttaaaacgatttttgtgccgaattttttcagtaaaaatcctataacaaagtttgtagatgcatcagcaataaaatgtattgaaaatgctagagacgttattgctacagcaatggatgtaactgttggcaagaaattaatatagcttaggatatacatgcctctcgcaaattccattaaaaataagataataagcattaaaatgaaatttttatgattagcgtaattatttaacgaagaatcttgcatataaaggaacctttccataaatctcttgtggttgtgatgaatgaccgattaaatcaagtaagtctcgacatattgtctgtgtagcatacttaattttatcttgttccattgtactaatcatgttagttaattgctcattaccgttagttaaacttgctacaatttttattgcttcttctggagtatcagcgattttaccaaaacctttttcttcaaagtaaagggcattttcaagctcttgaccaggtgcaggatttaggaaaatcattggaatacaacgggcgaaaccttcagttattgtgataccaccaggtttcgtaatcataagttgacttgatgccatccattcattcatgtgtttggtataacctagaatcaatacattctcgttagatttaaacttagctgttaaagaacgctttagctctttgctcttaccacaaatcataactacttgtgcatttgcacttttcgctaatatatcagtaatcatcgtgtcaaaacctttagatacaccaaatgcaccagctgacattaaaatagtttgcttatctggatctaagttgttgtctattaaccactgcttttgattaataggcgtttcaaatttgttatcaataggaatacctgtcactttaactgttgaaggatcaatacctacgtctatgaagtcttgtttcgtttcttttgttgccacataatatcttgttgaatacggcgtaatccagtttttatgtaagcgatagtctgtcatcactgtagcaactggaatattaatgttaaattgctcagttagtaccgacataactggtgtaggaaacgttaataatattaaatctggcttttcttttatcaataaattaattaacttattaagtccatagtatttgtaaaaacatttgtctagtttatctgggcggctgtaataaaaccctttgtacatatttctaaaatatttaaagctattgatataccattttttacaaatagaagtcaaaattggatgagcttccataaataaatcgtgctcaatgacgcttaaatggtctagattcatatcattaagttgattaacgatactctgtgtaacttgcatatgaccgttaccgaatgagccagtaataatcaatatctttttattttgagtaaccattaatagccaccctccgttagtttgaaaattttatttaagtgtaacttattttacggcattataaaagaaataaagacgcaaagtcgttacatttatagcaattttaatctatagatgaattgatacaaaataaaacgttattttataaagcaatttattgttctatgttttatttgtatatttaaaattatccagtatacaattatagcatatttttggaaacaattatgatattataccatgttacaagatggttttaataatttaagatgagccataattgtaaaactaattcataataccgtatgttttatttttaatagtagaaattagaaaatgctgattagtaggatataacagtgaaattataaatttattaacatcaacaaaacgtgtataataaacatattgtagaaaaaggagcggttcagtttggatgcaagtacgttgtttaagaaagtaaaagtaaagcgtgtattgggttctttagaacaacaaatagatgatatcactactgattcacgtacagcgagagaaggtagcatttttgtcgcttcagttggatatactgtagacagtcataagttctgtcaaaatgtagctgatcaagggtgtaagttggtagtggtcaataaagaacaatcattaccagctaacgtaacacaagtggttgtgccggacacattaagagtagctagtattctagcacacacattatatgattatccgagtcatcagttagtgacatttggtgtaacgggtacaaatggtaaaacttctattgcgacgatgattcatttaattcaaagaaagttacaaaaaaatagtgcatatttaggaactaatggtttccaaattaatgaaacaaagacaaaaggtgcaaatacgacaccagaaacagtttctttaactaagaaaattaaagaagcagttgatgcaggcgctgaatctatgacattagaagtatcaagccatggcttagtattaggacgactgcgaggcgttgaatttgacgttgcaatattttcaaatttaacacaagaccatttagattttcatggcacaatggaagcatacggacacgcgaagtctttattgtttagtcaattaggtgaagatttgtcgaaagaaaagtatgtcgtgttaaacaatgacgattcattttctgagtatttaagaacagtgacgccttatgaagtatttagttatggaattgatgaggaagcccaatttatggctaaaaatattcaagaatctttacaaggtgtcagctttgattttgtaacgccttttggaacttacccagtaaaatcgccttatgttggtaagtttaatatttctaatattatggcggcaatgattgcggtgtggagtaaaggtacatctttagaaacgattattaaagctgttgaaaatttagaacctgttgaagggcgattagaagttttagatccttcgttacctattgatttaattatcgattatgcacatacagctgatggtatgaacaaattaatcgatgcagtacagccttttgtaaagcaaaagttgatatttttagttggtatggcaggcgaacgtgatttaactaaaacgcctgaaatggggcgagttgcctgtcgtgcagattatgtcattttcacaccggataatccggcaaatgatgacccgaaaatgttaacggcagaattagccaaaggtgcaacacatcaaaactatattgaatttgatgatcgtgcagaagggataaaacatgcaattgacatagctgagcctggggatactgtcgttttagcatcaaaaggaagagaaccatatcaaatcatgccagggcatattaaggtgccacatcgagatgatttaattggccttgaagcagcttacaaaaagttcggtggtggccctgttgattaataaaagatttattgatgaaggtaaaactattgatgtttatttattcgaagcattaaataaccagataatcattgctataccagattggttttggtcatatcagatggcaatgacattagatgaagaaacttgttttgaagcaatactcatgcaattgtttgtttttaaagaagaggaagaggcagaatcgattgcatcacaactaacagattggatagaaacatataaaaaggagaaagactaatgaacttaaagcaagaagttgagtctagaaagacttttgcgattatttcacatcccgatgcagggaaaacaacgttaactgaaaaactattgtacttcagtggtgctattcgtgaagcgggtacagttaaagggaagaagactggtaaatttgcgacaagtgactggatgaaagttgaacaagagcgtggtatttctgtaactagttcagtaatgcaatttgattacgatgattataaaatcaatatcttagatacaccaggacatgaagacttttcagaagatacgtatagaacattaatggcagttgacagtgctgtcatggtcatagactgtgcaaaaggtattgaaccacaaacattgaagttatttaaagtttgtaaaatgcgtggtattccaatctttacattcattaataaattagaccgagtaggtaaagaaccatttgaattattagatgaaatcgaagagacattaaatattgaaacataccctatgaattggccaattggtatgggacaaagtttctttggcatcattgatagaaagtctaaaacaattgaaccatttagagatgaagaaaatatattacatttgaatgatgattttgagttggaagaagatcatgcaattacaaatgatagtgattttgaacaagcgattgaagaattaatgttggttgaagaagcgggtgaagcctttgataatgacgcgctgttgagtggagacttaacacctgtatttttcggttcagctttagctaactttggtgtacaaaatttcttaaatgcatatgttgattttgcgccaatgccaaatgcgagacaaacaaaagaagacgttgaagtaagcccgtttgatgattcattttcaggatttatctttaaaattcaagccaacatggaccctaaacaccgtgatagaattgcctttatgcgtgtcgttagtggtgcatttgaacgtggtatggatgttactttgcaacgtactaataaaaagcaaaagatcacacgttcaacgtcatttatggcagacgataaagaaactgtgaatcatgctgtagcaggcgatatcattggactatatgatactggtaattatcaaattggagatactttagttggtggaaaacaaacctacagtttccaagatttaccacaatttacgccagaaatttttatgaaagtttctgctaaaaacgtcatgaaacagaagcatttccataaaggtattgaacaattagtacaagaaggtgcgattcaatactataaaacattacacacaaaccaaattattttaggtgctgttggtcagttacaatttgaagttttcgaacatagaatgaaaaacgaatataatgttgatgttgttatggagccagtaggccgtaaaattgcacgttggattgaaaatgaagaccaaattacagataagatgaacacatcaagatcgattttagtgaaagatagatatgacgatttagtattcttatttgaaaatgaatttgcaacaagatggtttgaagagaaattccctgaaattaaattgtatagtttactttaacagctcaattgtataatcgaatttgttacattaaaaataattgtttcgttgaagaaaaataaattgtatattttaaaagaaaaaggtatactatgatgtatcaaatgaataacctatggcattttgtcagaggggagtaacttaagaatcatgaccgtataaatgattcgacactttatcgtcattacgaagatatcttccggtaaagtgggcaatttaaattgcttagtgagacctttgctatttatttagcataggtctttttgtttgtacttaacttatttatttaaaggagttgtacatgttaatggatccaagtttgatcttaccttatttatgggtacttgtcgttttagtatttttagaaggcttattagcagcagataacgcgattgttatggctgtaatggttaagcacttaccacccgaacaacgtaaaaaagctttgttttacggtttgttaggtgcatttgtatttagatttttagcattattcttaattagtattatcgcgaacttttggtttattcaagctgcaggagcggtttacttaatttatatgtcaatcaaaaatctgtggcagttctttaaacacccagaaattgaaagtcctgaagctggagatgatcatcattatgatgaatctggtgaagagattaaagcaagtaacaaatcattctggggaactgtgttgaaaatagaatttgcagatatcgcatttgccattgattctatgcttgctgctttagctattgctgtaacacttcctaaagttggtattcactttggtggtatggacttaggtcagttcgtagtcatgttcctaggtggaatgattggtgttattctaatgcgttatgcagcaacatggtttgtagagctattaaacaaatatccaggacttgaaggtgcagccttcgcgatcgttggttgggtaggtgttaaattagttgtcatggtattagcgcacccagacatcgctgtattgcctgagcacttcccacatggcgtattatggcaatctattttctggacagtactaattggattagtaattatcggttggttaggttcagttgttaaaaataaaaaatcgcataaataattgatgtgaagcggacaatcttaatttagtttaaggttgtcctttttcatttaattgagtgatttatgaaaaatggattttgaagaatgtgaatcaaaagatgcgatatagtattaagaaaatgtgccttttatatttagcattttttcaatagaaattatatagattttaaagcaaattaggtgttaatgtgtcataatgataagtgattttattgaatggagtggacattagtggatattggtaaaaaacatgtaattcctaaaagtcagtaccgacgtaagcgtcgtgaattcttccacaacgaagacagagaagaaaatttaaatcaacatcaagataaacaaaatatagataatacaacatcaaaaaaagcagataagcaaatacataaagattcaattgataagcacgaacgttttaaaaatagtttatcatcgcatttagaacagagaaaccgtgatgttaatgagaataaagctgaagaaagtaaaagtaatcaggatagtaagtcagcatataacagagatcattatttaacagacgatgtatctaaaaaacaaaattcattagattcagtggaccaagatacagagaaatcaaaatattatgagcaaaattctgaagcgactttatcaactaaatcaaccgataaagtagaatcaactgaaatgagaaagctaagttcagataaaaacaaagttggtcatgaagagcaacatgtactttctaaaccttcagaacatgataaagagactagaattgattctgagtcttcaagaactgattcagacagctcgatgcagacagagaaaataaaaaaagacagttcagatggaaataaaagtagtaatctgaaatctgaagtaatatcagacaaatcaaatacagtaccaaaattgtcggaatctgatgatgaagtaaataatcagaagccattaactttaccggaagaacagaaattgaaaagacagcaaagtcaaaatgagcaaacaaaaacctatacatatggtgatagcgaacaaaatgacaagtctaatcatgaaaatgatttaagtcatcatataccatcgataagtgatgataaagataacgtcatgagagaaaatcatattgttgacgataatcctgataatgatatcaatacaccatcattatcaaaaacagatgacgatcgaaaacttgatgaaaaaattcatgttgaagataaacataaacaaaatgcagactcgtctgaaacggtgggatatcaaagtcagtcaactgcatctcatcgtagcactgaaaaaagaaatatttctattaatgaccatgataaattaaacggtcaaaaaacaaatacaaagacatcggcaaataataatcaaaaaaaggctacatcaaaattgaacaaagggcgcgctacgaataataattatagtgacattttgaaaaagttttggatgatgtattggcctaaattagttattctaatgggtattattattctaattgttattttgaatgccatttttaataatgtgaacaaaaatgatcgcatgaatgataataatgatgcagatgctcaaaaatatacgacaacgatgaaaaatgccaataacacagttaaatcggtcgttacagttgaaaatgaaacatcaaaagattcatcattacctaaagataaagcatctcaagacgaagtgggatcaggtgttgtatataaaaaatctggagatacgttatatattgttacgaatgcacacgttgtcggtgataaagaaaatcaaaaaataactttctcgaataataaaagtgttgttgggaaagtgcttggtaaagataaatggtcagatttagctgttgttaaagcaacttcttcagacagttcagtgaaagagatagctattggagattcaaataatttagtgttaggagagccaatattagtcgtaggtaatccacttggtgtagactttaaaggcactgtgacagaaggtattatttcaggtctgaacagaaatgttcctattgatttcgataaagataataaatatgatatgttgatgaaagctttccaaattgatgcatcagtaaatccaggtaactcgggtggtgctgtcgtcaatagagaaggaaaattaataggtgtagttgcagctaaaattagtatgccaaacgttgaaaatatgtcatttgcaatacctgttaatgaagtacaaaagattgtaaaagatttagaaacaaaaggtaaaattgactatcccgatgtaggtgttaaaatgaagaatattgccagtctaaatagttttgaaagacaagcagttaaattgccaggaaaagttaagaacggtgttgttgtagatcaagttgacaacaatggtttagcagatcaatctggtctgaaaaaaggtgatgtaattactgaattagatggcaaacttttagaagatgatttacgctttaggcagattatatttagtcataaagatgacttgaaatcaattacagcgaagatttatagagatggtaaagagaaagaaattaatattaaactaaaataatgttgaggtgaacaacgtgtcaatttttagccagtttttaaaaagatcaagccctcaacaaggtattgtattgtactatatcgtcgcaattgtcattgcatttttattattaaacttaccgtatgttcataaaccaggtgtagaagtaaatccaattgacacattatttgttgccgtatccggaattagtgttactggattgtctccgataagtattgtcgatacctattctacatttggacaattaattatcctcgtgatattaaatattggtggaattggcgtcatggcaattggtacgatgttatgggtggtactaggtaaacatattggaattagagaacgtcagttaattatgttagataataacaaaaacacaatgagtggtaccgtcaaattgattattgatattgtaaaatcaatatttgtaatcgaactcgtaggagccatgttattagcattttacttttatcgagataatccagatttaaaatatgcaatcatgcaaggtgtttttgtttctatttctgccactaccaatggtggattagatattacaggtaagtcattaattccttatgcacatgattattttgtacaagcgatagttatatttttaataattttaggatcaatcggcttcccagtattattagaagttaaagcttatattcaaaatagggttactaattttagattttcattatttactaaaattacgacatcaacatatttattcctatttattgttggggtattagccattctattatttgaacataaccatgcgttcaaaggtttaagttggcatcaatcgttattctattcgctgtttcaatcagcgactacaagaagtgcgggtcttcaaacaattgatgtgacaacactaagtgaccccactaatattatcatgggtattttaatgtttataggatcttcgccaagttcggttggtggcggtattcgtacaacaactttcgctattttaattttgtttttaattaactttagtaataatgccgataaaacatccattaaagtttacaatagagaagtacacattatggatattcaacgttcatttgcagtatttacaatggcgacaattttaacatttttaggaatgctaattatatcagctactgaaaatggtaagcttacatttttacaagtattttttgaagtcatgtctgcatttggaacttgtggactatcgcttggtgtcacaagtgatattagtgatatttctaaggtcgtactaatgatactcatgtttataggacgtgttggcttaatatcatttatcattatgatagcaggacgtcgagaaccagataaattccattatccaaaagaacgtattcaaataggataatataatagcaatctaagtttagttaatgtagattttaactggaacttagattgcttttttagtttgtatttttaacttattttataagacgattggtttcgaaaatggtaaactagtaacaatgagaggtgtaacatgatggaaaaaaatgaaaacattaatgtagagattttaactacgtcagatatgcatagtcatttcttaaatggtgattatggttcaaatatttatagagctggtacttatgttaaccaagtaagagcacaaaatcatcgcgtcattttattagatagtggcggaagtttagctggctcgttagcggcctattattatgctattgttgcaccttataaacgacatccaatgataaagttaatgaacagaatgcattatgatgctagcggtgtgagtccaagtgaattcaagtttggtttatcatttttaactcgttcaattgctttggcacgttttccatggttatcagcaaatattgaatacaatgttactaaggagccttatttttcaactccatattgtattaaacattttggtgacttaaaaattgctatcgtaggcgtcacagcagatggtttaatggaaaatgagtattctgaaatggagcaagatgtatctattgaaaagacattagtggcatcaaaacgttggattagatatatccatgaagttgaagagccagattttttgattgtaatttatcatggtggattgaataaaattagtaatagtacgaaaaataaaaaggcaagttcgaatgaagctgaaaaattaatggaagaactcggtgttatagatttaatgattacagctcatcagcatcaaacaatagtaggtcaagatcatgaaacgtattatgttcaggctggtcaagatgccaaagagcttgtacatctttcgattaattttaaaaagagaacaacaacttatgatgttgaaagcattgattctaaagtgattgacttaaatgagtatgaagaggatcaagaattattagatttaacattctatgatagaaaagcagtggcttattggtcacaggaaatcataagtgataaaggtttgatgttatcagtaaatgggttacaagatttagtctgtcaaacacatccattttcgcaattattacatgatgcaattcaccttgcatttgataatgatataacatgtgtccacgtgcctatgaacggagagaaggggttgagtggacagattcgaaatgaagatttgtatcatgcatacccatatccagataagccaatggatatgacaattagtggtcaaaatatcaaagatatattggagtatagttattcacatttagattttgttaacgagcaattaagcttaacaattattgatgaaacgttatgtacaatgtggcaaggattcaattatgagattgatatgaatcaagaacctgggcaacgagtaatgttagatcaaattgatttgactaagagttatagagttacaatgactgactattgttatcgtaactacaagaattatttaaaaaatgctattatacatgaatcatacgatgaaacaatgagtacattaattgcagagaagttaagagatccgaattatcgtatttcatgtagtgataattttatagttaaaaacaggtaaatattgctatgtaataaattaattataagttcaacaagtataaaaacctttcttagagaagattatctaggaaaggtttttagaattttaaaattgatataaaagaacagtgaaattctcattcattatatataagtaaacaaaaaagctaaaatggtatataccattttagcaagtaacggaaacggagggattcgaaccctcgcgccgctttcgcgacctacacccttagcaggggcgcctcttcagccaacttgagtacgtttccaatggctccacaggtaggactcgaacctacgaccgatcggttaacagccgatagctctaccactgagctactgtggattaatttgtatgtgtttgaatatcaagcacaaatattattataacaagattaagttaatttgcaatagataccttaaaaaaatatgcagaacatttacactatatttataaaacattccgcatattttaaaaataaacaatttatttatcttcaaataaagaatagcgtgtcaatgcttcaaacacattcaatgtggctttattataatctattggttggtcgggattttttgatatcatgcgagattgtttatctaccatgtaatagtaaaaaatggaattgttatattgatgccataaactgtggtatgaaacatgaagaatgattgattcattattaataaatgtcactttacatttacgattttttaattctttaatactttcgatataatgcatatttaaccaaatattttcattttgtctgtcagaatgtgttgggaaaaaataagttggaaataatggtgttagtaaaataggtggtttactagaaatgccagtaatgcggtttgtctctgctttcttgccaagataagtattaccataaaatttgcaagagcgttcaatgattttctggactttaaaaggattttgaatacgcgttttgtcaaaccgaattatttcactaccgtttctttgatcgtcatcatcaaatgctggtcgaataaccatgtctcctttgcgtatcacataaatattttgagaatacataagcaaaacctcgctttattaagttttaaaccattaatataaaaatacaattaatgatataaagatattttataataaaattctgagttgtcaagttattattttggtgaaaatgtacaataatttttaactaatagtcagaatattcattgatttcaaaattagaaaaatgtatacttattataaattaaagaaaggtagtggtttctatgaaatacaatactaatgttaaacatacaactttagaagcgtttgtcacaactgtcaatgatttgggtattgaattaattatcaatgaagcacttcgagaggtaagaaaacgacagctcatagaacttatagatgacgcactcgtcaataaagatgaagcagcatttaatcaatatacggcagaatacaaaaatttggaggcatttctcggtgaataacattgattcgaattccataacgcaatcataaaaggactattcttaacatctcatacatgtaagaatagtcctttaatcgtttatgacattaatctaattaattcatgtctatctatgtcaccgaaataatgatataaatcatattctgatagtgcttcttctatgtgctcaaagtcgtgtagacagccaactaatgcattttcaagatcagtgacatctccgacaccaaagaaatcaccgaatatttttgcatgttcgattttacctcgtttaacatcaaacttaatttgtacaaatcctttttcaaatttttcctcgcgttcaaagttatatttagggtttctaccataattccattcccaagttctatatttgtcgttacttaacttttcaatattttcccaatcttcatccgttaatttatattcttctacttcagtttctccaaagatagttttcaagatgatttttttaaattcttcaatttctaaagggtcatttaaaaattcttgaatgtttgctacccgtttacgaacagatttaataccttttgatttaatcttagctggattaacttttagtgcattctgaacttcgtctaaatcactatttaacatcaacgtaccatgactaaacattctatttttaactttaaccatagcattccctgagattttcgcttgtccaacttgaatatcgttacgaccagttaattcagcatttacgcctaaagattgtaatgcttgaacaattggttcagtgaatttttggaaattgtggaaactgttaccatcatcatctgttataaaactaaagtttaaattgccagtatcatgataaacagcgccaccaccagaaattcttcttactacatcgatgttgtgagcatcgatatatgtctgatttacttcctctatcgtattttgattctttccaacaatgatagatggtctatttatgtaaaataaaaagtaactttcttctgctggtaaattttttaaaacatattcttccattgctaagtttaaagttggatctgtaatattattattactaatgaatttcattacaatctctcccttatatctatatatattctctacttatttatgccttaactttgctcaaaatgccaattatatactcacaaatcattctaaatatcggcttaaagttacattttattatttttgattgttaatagtttatttgttaagtgaattttagtacaatataatttagttatgatttaaggaggacttaaaatgactgttgcagaagtgggtaacattgttgagtttatggatggattaagaggtcgtgttgaaaaaatcaacgataactctgttattgttgacttaacaattatggaaaattttaatgaccttgatttaccggaaaaaactgttatcaatcataaacgatataagattgttgaataagaaggtaagttataatgaataaaatctcgaaggctttaacttggtttattataagtttcattatatttcatctcatattatttattatgtggggcgaacaccaagaatactggtatttatatacaggtataatgctaattgctggtatcagttatgtattttatcaaagagatattgaatctaagcggttgcttacatcaattggtgttggtattattacggcaattattttaattatgcttcaacttttattctcacttataacttctaatttaagttatagttcattaattaaagaattagcaagaacaggtgtcaattggaagtggcaaatgttagtaactttactttttgtcattccatgtcacgagttatatatgagaactgttttacaaaaagaattaacacatttttcaataccgaaatgggtagctatattaataactgcaatttgttctagttcattatttatttatttagataattggtggatagtaacatttatatttgttgcacaagtgatattatcattaagttatgagtatactcgacgtatagcaacaacatccgttgcacaaattgtagctattatattgttattaatttttaatgcttaaataagcttttcttagacgtatgtgttctaagaaaagcttttttgcttaagaatagcaatacgaagattcgaggcatgcttcattatagtggtaatattttttaacagcaagcggttattattgagattaggttttagtcagtttttattactaaatattttataaaaattatataatatttttgagcaagttgaattgatggtggctatctgagtaaaggggggtggtgcctatggcattacttaacacttttgaaaggaaaagcctattgtgatatctattgcaaacgcattacatttaatgttaagtttcggtatgtttatcgtcactttcattggtatagtagtagcaataataaatttaagcaataaaaaataaccatcatttcaaaactttgacatagaatgatggttaaagaaaatctcatttagtcaccgtctttttaacgggctcattaggcgacatgttcctgcatgtcgtctttttacatttttatagtaacatatcttttatttaattgtctatttttattagatgtgtaacaaaattttgaagtattttccgtatattgcctgctaaacatgtcagatttgaaaggaaaatcatactgtggtagaaatcaattatgattatatggtagtacttataaataagtgatttctattgaatatgtaatgaagttcatatattaatataactttcattgatatagaagtcgcaatgattaatttaaacaataaaaaacaaccatcatttccaaactttgacaacgaatgatggttaaagaaaatctcatttagtcaccgtctttttaacgggctcaataggcgacatgttcctgcatatcgtctatttatacactgcacaatttaataataatacaattatactttgatgtccatttaacataaagtggttgaaatttgcagcaaataaattaaccttgactattttcagaaaattctgtataaataacgaaaaagagatatggattaaatatgaagaggtgtttttatagaagaataaaatttttggcactatattatatttaactttagcacttggattatcaacagcagcttatgcatctacagaatacgcagaaggaggcacttggagtcatggtgtcggcagtaagtatgtttggtcgtattattatcatggtcataaaggacatggtgcaacagctattggaaaatatagatcatttagtggttatacaagagctggtgtaaaagcaaaagcatcagctactaaacataattggtgggtcaatagagcgtattataacatttattaaatactaaaaaatcatagaaaataaacaacgcaagaggtacaacatgaaatggttcaaattaatacttgatgttacaatcttcattctgattgctatattgttatttgtttatacatataaagaaaacgaagaaatattgcctgatactaaataccctatagcggtaactgactggaataaaaaatatagtaaaaatgagatttataaacgtatagatcaattcgctaaaaatgagaacgtagcaatctataaatcaacttcaaattatacaaacaaaaacgtagataaagatatatatgtatttaataaatcaaaagcagcaactatcactccttttaatgctaaatataacattcattatttaagtgacgacgaagtattaaaaaaagatatcaaagggagttattttgtaaaagacaaaaattttgacgtgtctaaattcataaattttttaaaagaatatggtgttactgctgaatcatacaaaatagatcatatgatgattgccgttggtgtcattaaacaaatgaatatagtagttccattatcctcacttttaatcgtttattttatttattatattttcgaaaagaacattaatttcaaagcgtatgcgattaagtatttaaatggttttacattaagaaaaataattttcgaaaatttttcaaagaaatgcacgtattgggtaacgttaatcataactcaaattcttttaactacaagtgtactttggatattaaattacacgggtaatttagatttattcatattaagaatagttctgctttcatgtcttttcattttaacgattagtgttattaatttatggactttcttaatgttactaaatttaaatattgcaaatatgattaaaggtaagcagcactttaaaacaattcgttttattaatacagtttgtaaaagtattctcttagtactaatagctaatgtaatgatagaaaatactagtgttattaaagatttgaataaaataaaagaaactgagaaatattggaatgtattagatgattattacacgattgaatttgcaccttatcacgaaacaaaacaaagtttgattgataatatggtgcgatcagaacaattagtaaaggctagtgaagcagaaaataatgcgattttattcaaaccaaagggtgactccgttgacaatgacaacttttcgcctgatgaggggaatgtaatattagtaaataatcagttctggtcgatttattacaagcagtttcaacctgatattccgataaaaaatcaaaaaaataatgtcgaagtaattattccacaaaagtttcatgcaatgcgtaatgaaatcaatcaagcatatcattcatggtttgaatttgtacaaaataaaaataataaagagaataagttatctatacagtttatcaacaaaaatgattgtcgaattttttcatttgatgcacgagatagtcgccatttgtcatttatagaggcgccaatcattgtgaatgttcaggcatcagatttatcgaatgatttttattatgccatgatcagtcaaggcgggtatttattcaaaaattatgacgcgctagtaaaaaatattgaaaagtatcatcttgatggggaaatcagtggaataaccaattataaagatagcgtgatggaaatgtatcatgaaaacaatttgaaattaacagtactcaacttttcacaaatcattatcgcaatcattttaataattattattttatttgatgtgaaatattattttgaacagcatcgaaaattactcgtaatcaaaaagctatatggttattcaacattaagagccaattaccaatacttattaataaataatatagttgttatttttattggaatattgacgaatgtaattttacattctcactatataatgatgttatttgcaacgattcttgtcgttcaaatattattgcagatttgcagcctatactatcatggccgacgttttaatgaagttatcaaggagttttaactatgaaatttatcattgcaatattattaggattaatattatccattactattgcttttacaatcatacatcatcctatacttgatcgttttaatcctttcttaaaaacggagtatagttatgccaaagtgccaaaaggtacgcaacaatatgttaatattacggcttatagtgaaagaggggaaaagcttgattataaattaacatttaatggattttcacctagtagaacgtatgtcgaaataaagcataaagggcaatatgtcatatcgatcacatatgttgaaaaagaggatacaccaaaagaggtaagacaagaatgatagaattaaaagatttaaccatacaaaaaggtaatacacatattttgaagaaacttaatttgaaatttcaatgtggaaaatcatatgcacttattggtaaaagtggatgcggtaaatctacattattaaatactattgctggacttgaaaaaacaggaaaacaatatgtctattttaatggtcaattagaacaatttaaatctaatttttacagagataaattaggatatttatttcaaaattatggattaatcgataatttgacagtaaatgaaaatttagatattggattagcatataaaaaaataagtaagaaagaaaaagaacaaataaagatacgttatatagaacagtttggtctgtcaaacagtttaaaaagaaaagttcatacgctaagtggaggtgaacaacaacgtgtcgctttaattagaatgatgttaaaagatccgattgttatgttagctgatgaaccaacgggtgcgttagatcctaaaacaggacagatgattattcaatcattatttggtttggtcgatgaaaataaagtgctgattttagcaacacatgatatggctattgcaaatcaatgtgacgaaataatagatttagaacagtatagaaaagtagcatctatgtgatatccaaaagataaaattaaaagccaatcaatgggaaatgttgacttcaacactccgtttgattggcttttatactgtgttactaagttatgaaagtaacaacggcaaactgaaaaaaagcaatataataatatttaatacgattagtaataaatgtaattgatttttcgttttaatatagcaaaaaacaatgactaaagataacaacaatatcatgattgcacctgggaagaaccataatgctgaagctgtgtaccaaatcattggtaacgccataataataaaagatataagacaagaaaggataccaataatattataagttctagtcaaaattacacctccaattttcactttaaaatgacatgcgtaaaacaatcattttaaatacattatacaataaaattaaattgtgcggtagaagaatttgaaattaaattgaattgtttttggtagttggtatatttataacactctgcaaaagaatgtagcaaaattagataaattagattatttaaaattatgcgtgatattattatttttatcatgcaaataattataataacaatatttaattattgtatttacagttgattaatagcgttgtgaagtataaaattattttgtaaaacaattttgttattaagaggtgcgctatggaaaaggggattttcaattacgataatgcgaatgtattaaaattagatactaatcagttaaatgaaaacataaaagtcattgacgatatatttaaaaattatgagcagatagagccaactatagaagtcgaaaatggaaatacaaaattaaaattaaatggatattttattgcgtcaattataagctcattaaatttaaataaacttaataatttatatgttgaagaagaattttatcatacatataacgaattaattgttaaatatactgaggtaaaggaataattataatgaaaaaaatatttatgatggtacatgagttagatgtgaataaaggtggtatgacctcttcgatgttcaatagaagtaaagagttttatgatgcggacatacctgctgatattgttactttcgattacaaaggaaactatgatgaaattattaaagctttgaaaaaacaaggtaaaatggatcgaagaacgaaaatgtataatgtatttgagtattttaaacaaatttcaaataataaacattttaagtctaataaattgttatataaacatatttcagaaagactaaaaaatacgattgaaattgaagagagtaaaggtatttcaagatattttgatataacgactggtacatatattgcctacattagaaaaagtaaatctgaaaaagtgattgatttctttaaagataataaacgaattgaacggtttagttttatagataataaagtgcatatgaaggaaacatttaatgtagataataaagtttgttatcaagtattttatgatgaaaagggatacccatatatttcaaggaatattaatgctaataatggtgctgtaggtaaaacttatgtgttagttaataaaaaagaatttaaaaacaatttagcactgtgtgtttactatttagaaaaactaataaaagattctaaagatagtattatgatttgtgatggaccagggagttttccaaaaatgtttaatacaaatcataaaaatgctcagaaatatggcgttattcatgttaatcatcatgaaaatttcgatgatacgggtgcatttaaaaaaagtgagaaatatattattgagaatgcgaataaaattaacggtgtaattgtattaacagaggcacaaagattagatattcttaatcaatttgatgtagaaaatattttcactattagcaattttgttaagatacataatgctccaaaacattttcaaactgaaaaaatcgtaggtcatatttctagaatggtaccaacgaagcgaattgatttgcttattgaagtggctgagttagtcgtaaaaaaagataatgctgttaaatttcatatatatggagaaggatctgtcaaagataaaatagctaaaatgattgaagataaaaatttagaaagaaatgtttttcttaaaggatatacaacaactccacaaaaatgcttggaagattttaaattagtcgtttctacatctcaatatgaaggtcaagggttaagtatgatagaagcaatgatttctaaaaggcctgttgttgcctttgacatcaaatacggaccaagtgattttatagaagataataaaaatggttatttaatagaaaaccataatattaacgacatggctgataaaatacttcagcttgttaataatgatgtattagcagcggagtttggttcgaaagcgagagaaaacattatagaaaaatattcaacggaatcaatattagaaaaatggttaaatcttttcaatagctaaatgaaaaaatcctaggtattcatgagtacctaggatttttacgcatgataaatacaaaaaaagagaggatagtcctctcaaacaatagttaataaaattgtagccatttcttccagctgtaactactaatacaagctaagttcattacgatatgtatgatttcaaattcataaccacttacatatcctcttgtaagtttaagtgtgaagattgagcctaacataacacaaatataaaaaacattaacataaggcgttaaaaagccgataataagtgctaaacctccaacaacttcaccaattgacatcaatactgcgatggtaggtggtaaacctaaagagcctaagaagtgaattgttccatctaaatcaacaaatttcaaagtaccatgcactaagaatgatgttgctaacatccatctaattaaaagcatacctaatttcatcatgtcacctccaacattcatatttttaaaacatagtccaaattatatttgtaaacatgtggaaagtaaagattttttataagattaattattaaatattctattgtattgaacaattgttgtagaaagatgtttaagtcatcagttactttttgtatttataaataaagattagtacagcatagtgcaaagattatagggaaatgaattaactattgcatcgctatttatgaatcgtaaacactattatgaaattgcgagagtagtatggacaattagaatgatggtttgagataaatgagtgttattaaccagtgcgtcattttcaaaattagatgccatttgctgtttataataagaagatttgataattaactatgataagaaaaaataataatcccctaaatacattataaacaaattaaatgataaaataataatatatatttctactaaagttgtttggaggtaaatgtgtgaataggaatatcgttaaactagttgtgttcatgctaattttagttgtagcagtagcgggttgtggtcaaaaagatactgaagagaaaactgaaatgacgacaataaaagatgaattaggaactgaaaaaattaagaaaaatcctaaacgtgttgttgtattagaatatagttttgctgattatttagcagcattagatatgaaacctgttggtattgcagatgatggcagcactaaaaatataacaaagtcagtaagagataagattggggcatatgaatcggttggatctagaccgcaaccgaatatggaagtgataagtaaattaaaaccggatttgatcattgcagatgttagcagacataagaaaatcaaatcagaattgagcaaaattgctccgacaatcatgttagttagcggtacgggagattataatgcaaatattgaagcatttaaaacagtcgctaaagcagtaggcaaagagaaagaaggcgagaagcgtctggaaaagcatgataaaatattagcggagattagaaagaaaattgaacagagtacgttaaaatctgcatttgcattcggtatctcaagagcaggtatgtttattaataatgaagatacatttatgggacaattcttaattaaaatgggtattcaacctgaagtcacaaaagacaaaactacgcatgttggtgaacgcaagggtggtccttatatatatttaaataatgaagaacttgccaatatcaatccaaaagttatgattttagccactgacggaaaaacggacaaaaatagaacgaaattcattgatcctgcagtttggaaatcattaaaagctgtgaaagataacaaagtttatgacgttgaccgaaataagtggttgaaatcaagggggattatcgcaagtgaaagtatggcagaagatttagaaaaaattgcagaaaaagcaaaataaaaatacagcgctactcgtaaatcatataagagtggcgctgtatttttaattatgtttattatctgtcggatgtgatgatttacctgaaagtttatttcgaataaatttaattacataaccgacaaggattgttttaacagttcttttaatgaattggcgcatcgttacatacctcatttctctatatcttacgaactatatacccattcatatatgctttttaaacgtcattgtcacaatttaatttttagggaatataatataaccatctttatctgcttttttagtaaaaatgacaaaaattgcatgtattattgagatgatggtagggatacctgtccagaaaaataataagtgaaaaagaccttgtccaaatttatcagcataaaatttatgaatacctaaacctccaagaaataatgcaacaataacataaatggctttattgactttcatttgtaaatcctccttaactataattctacttaaattcgttgtgaaaaccaatatttctaactttagaattttcaaactttctaaaattataagtatatctttttaaaataagctagaatttctatataataaatgttaataacgtaaaagggaatgatgacatagtgatacgtcaagcacgtccagaggaccgatttgatattgcgaagttagtttatatggtttgggatgatatggaattagaattggtaaagcatctacctaaagacatggtattagatgcaattgaaaaaagctgtgttgatgcaacatatcgaactttttatcagcatattttagtttatgaagtagaaaataaagtagcaggttgtattattagctatagtggtgaaaatgaattgaaatacgaaaaagcatgggaactacttgacttgccagaaaaaataaaacaatatggcacgccattacctgtaaaagaagctaaagacgatgagtattatatagaaacaattgcgacatttgcagcatatagaggtagaggcatcgcgacaaagttattaacgtcattacttgaatcaaatacacatgttaaatggagtttgaattgcgatattaataatgaagcagcattaaagttatataaaaaagtaggctttatatctgatggacagattgaattatacaagcacatgtatcatcatttaattgttaaataaaaaaactcgacagttcgatgtaagtcgattgccgagtagtatcattttctattaaatgcctgcaaataatgcactaatataaatacctaatgcatataataaaccgaaaaatgtatttgttttaccagcagcagccattgctggcatcattgtaggcggtgtatcattcttcttgaaacgtctgataactttaacaggcattgggaatgataacaacgcaagtaagtaaaataatgagccaccaggtttaataatgatcgtaagtacaataaaggcataagcgataaagtacatgattgccataaatgttaaagaagcatttttacctaatagaatgggtaaagttttgcgaccacttgctttatctttgacacggtcgcgaatattgttagccatattaattaaaccgatagtgattactataggtacacttaaccaaattacataactttgaatattgccagtttgaataaagaatgcaataacgataataaacatacccataaatacgcctgagaataattcaccgaaaggcgtccatgaaatagggaaagggccacctgtatataggtaaccaacagccatacatactaatccaactggtaataaccaaaatgaagagttagcagctaaaaacaaacctaatattgctgctaagatgtaaaatgcaatggctaatcgtagcacaagctctgggctcataccgttgcgaacaatggcaccaccaatgcctacagattcatgatcatcaaggccttttttataatcatagtattcattaaacatattagttgctgcttgaataagtaagcatgctagtaacatggcaatgaataggctgattttaatatgatcttcgctaccaagaaaatatattttagatgctgctgtaccaactaaaacgggtactacggaagcagttaatgtatgaggacgcattaaatgccaatatttcttaactgtagaatattgctgatattgattactcattgaatacaaaacctctttaaatcatattttttataacaaagatattttaatagaaagtagcataaaggtcaattgacgtgaaaaattgcaagataagtttaagcaattcttgtaacacaattatccaaaaatgatacaatataataatgagtgaaaaaagacgaagaaagaagtgaaatggatggctacgggcgtattagaggacgatattgtcaaagagatatatggcagctcaaaggaatgggtttcagttgaagtgaaattatcacagtcactagacccgagcacattatttcatctcactgacaatgaggcaggagatcgcttttatatgcgtttgaatgataatcgaacgtcatattttggctacaaagcaattcaattattcaaaaataattctaaaaataaacaatctatttttaaagactgggaaaaattaaaacataacatcacatttatacatccgcaatctgagaaacatcatcttcgagttgttggagggttccaattttcaagtcataaatcagatgatgaatggcgagagtttggactaaatcattttgtattacctgaagttttaatttcaactgataataatgggacatttttaacttatacagttaaaagggaaagttttactgttgaggcattgaacgatttaatggatttgttcaacaatatatcggacatagatgtggacgagcaaattggggaaattactagaaatgaagatatttataaagatgactggcgtcaacttgtagtagaagctatagaatctattaataatgaagaaaaaattgtactagcacgtagacggttaataaagttcgataaagatatcagtattccatatattctaaagcaagcatattctaaagaaaaaaacagttatatattcttgttagaatcacaagattctatattcttttcacaaacacctgaacaattaataaaggtcaataataaaatactatcgactaaagctgtagcaggtacaattaaacgttcacaagatgaggacgaagatacaaaaaatgttgaagcatttttaaaagataataaaaacttaatcgaacatcgatttgttgttgacagtattttacatgatattaaaccttatatcactgaattacattatgataagacgcctaaaattctaaaaaatgatcatttatatcacttgtacactgaaataaaggcgccactgaaggatgattcgtatattagtttaattgataatttacatccaacacctgctttaggtggctatccaaaagaatttgcaatggattttattgagcagaaagaatttggtacgcgaggattatatggtgcaccggttggctatatagatatatacgatgattgtgaatttattgttgcaattcgttcgatgcttattaagaaagcacaagcaactttatttgctgggtgtggcattgttaaagattctgatccagatagtgaattggcagaaacgaaccttaagttcacacctatgatgaatgcattaggagtcgatatgaatgggaaatcataaagcagctttaacgaagcaagtttttacatttgcatctgagttatatgcgtacggcgtaagggaagtagttatcagtccgggatcacgctcaacgccacttgcacttgcatttgaagcacatccaaatattaaaacatggatacaccccgatgagcgaagtgcagcgttttttgcagttgggttaattaaaggcagtgaaagacctgtcgctatattatgtacgtcaggtacagcagcagcgaattatacgcctgcaattgctgaaagccaaattagtagaattcctttaatcgttttaacaagtgaccgtccgcatgaattaagaagtgtaggcgcaccacaagcgattaatcaagtaaatatgtttaataattatgtaagttatgagttcgatatgcctattgcggatgatagtaaagagaccattgatgcaatttactatcaaatgcaaattgctagtcaatatttatatggaccacataaagggccaattcattttaacttgccatttagagatccgttaacacctgatttgaatgcaacagaattgttaacttctgagatgaagattttaccgcactatcaaaaaagtatagatgcatcggcattaagacacattttaaataagaaaaaaggtttaattattgtaggggatatgcagcaccaagaagttgatcaaatactaacgtattcaacgatatatgatttgcctattttagctgatcctttaagtcatttaagaaaatttgatcatccgaatgttatctgtacatatgatttgctgtttagaagcggcttagacttaaatgtggatttcgtaattcgtgttgggaaaccagtgatttctaaaaagttaaatcaatggttaaagaaaactgatgcatttcaaatattagtgcaaaacaatgataagattgatgtctttccgatagcgccagatatttcatatgagatttctgcgaatgatttctttaggtcattaatggaagacacgacagttaatcgcgtaagttggttagaaaaatggcaatgcttagagaaaaaagggcgtaaagaaattaaatgttatttggaacaagctacagatgagagtgcattcgttggtgaattgattaagaaaacatctgaaaaagatgcattatttattagtaatagtatgcctatcagagatgtagataacttgttattgaataaaaatatagatgtctatgcgaatcgtggtgcgaatggtattgatggtatcgtttcaactgcactgggtatggctgtgcataaacgaataacattattgataggtgatttatcattttatcatgatatgaatggactattaatgtcaaaattaaataatattcagatgaatattgtattattgaacaacgatggtggcggtattttttcatatttaccacaaaaagaaagtgcaactgactattttgaacggttgtttggcacaccgacgggattggatttcgagtatacagctaagttatatcaattcgattttaaacgttttaacagtgtttcagaatttaaaaatgccacattgttatctgaaacttcgacgatttatgaattgataacgaatcgcgaagataactttaaacagcatcaaattttataccagaaattgagtgaaatgattcatgacacattataaattttatgaagcaaacgttgagaccaatcaagttttagtatttctgcatggatttcttagcgacagccgtacttatcataatcacatcgaaaaatttactgataactatcatgtcatcactatagacttaccaggccatggcgaagatcagtcttcaatggatgaaacgtggaattttgattatattacgacgttgttagaccgaattttagataaatataaagataaatcaataacattgtttggatattcaatgggtgggcgtgttgcattatattatgcaattaatggtcacatccctatatctaatttgatattagaaagtacgtcaccaggtattaaagaagaagcaaatcaattggaacgccgtcttgttgatgatgcacgtgctaaagtattagacatagcaggtattgaattatttgttaatgattgggaaaagttgccattatttcaatcgcaactagaattaccagttgaaatacaacatcaaataagacaacaacgattgtctcaatcgccacataaaatggccaaagcattaagagattatggtacaggtcaaatgccaaacttatggccgcgcctgaaagaaattaaagtaccaacattaatattagctggagaatatgatgaaaaatttgtacagattgcgaaaaaaatggcaaatttaattcctaatagtaaatgtaaattaatttctgctacaggtcatacaattcatgtggaagatagtgatgaatttgatacaatgatattaggatttttaaaggaggagcaaaatgactaacagacaatgggaaacacttagagaatatgatgaaatcaaatatgaattttacgaagggattgctaaggtaacaataaatcgccctgaagtacgcaatgcgtttacacctaaaacagttgctgaaatgattgacgcattttcacgtgcacgtgatgatcaaaacgtttcagttatcgtattaactggtgaaggtgatttagcattctgttctggtggtgaccagaagaaacgtggacatggtggttatgtaggtgaagaccaaatccctcgcttaaatgtattagatttacagcgtttaattcgtattattccaaaaccggttatcgcgatggtaaaaggttatgctgtaggtggcggtaatgtactaaatgttgtttgtgacttaacgattgctgctgataatgctatttttggacaaactggtcctaaagtaggttcatttgatgcgggttatggttcaggatatttagcacgtatcgttggacataagaaagcacgtgaaatttggtacttatgtcgtcaatacaatgcacaagaagctttagatatgggtctagtaaatacagtggtacctttagagaaagttgaagatgaaactgtgcaatggtgtaaagagattatgaaacactcaccaacagcgttacgattccttaaagcagctatgaatgctgacacagatggtttagctggtttacaacaaatggctggggatgcaacattgctttattacacaactgatgaagcgaaagaaggccgtgatgcgtttaaagaaaaacgtgatcctgacttcgatcaattccctaaattcccataagttattttgaatatgatattaagtcacttgcgtcgtttattagcgacgataggtggcttttttattttataagaatttaaaagggcattttaattaattatcataaagataagatagtttgagaaaaattaatagagaaagaataaatgttaaagattattattacaatgaaaaaacgagctggtgagaaattgaattctcgccaacccgctttatgaagtgaaatcatttaaattagttatactaagcgctcataaacgattggtcgcgaagtgccaataccttgtttggatgacgtttgcatgaggatatgctgtgtatcatcataatcaagaatataaatgatttcttcattatcaatagatgaaaatttaatgcgttgatgtgccgtatctataaaaagaatatgatattgattgtgacttgtatcatcgccatgacgtatacaaattgatttttgtaattgatgattactccaattaccaatgaataaattgatattggtttgttctagatgtgtgagtttggttgtgtcgtaaactaaatttataaattgtagttgatacatagttttacctgcctttaatcaatatctatattactttttagtaacctatcattgaaccataccagttataatcacgattgaatgataaatgtaataggcttgaatctgcatcttggattgataattctgtatcccaaggattccagtaaataagtttttcttggtcattaattttagcattaccaacaactgctagcgcatgtcctaaatgtgggtcattagggttttgagatacactttgtgcaaggatcataattcctacattatcttttgtaagttgatcaacttgttcatatgatggtacgccttcttgataatgaatatctctgccttgtgatttaccgtattcaatcatttgattagggaatgttgcacaattaggaaggtcttgctcacttacttcagggtataatgtacgcataatatcatgtgcattataagtgtctgtatttttagttgcatttaataatgctgccatactgaatcctgcacaccatgagttatcgaattgttgttctctaattttgaagttttttaatgtattttcatattgaacttgatcttcttgtatcgcttcgttttcttcaactttagtaggtgttactgtattttttaactcttgtttcaattttgctgaaactgttttagcactttctttttcttttacattaccaggtagaggcgtagcttttactaatctaactttgccatcttcttcaaaataaaaccctttttcatcagtaagaacagtgatatttgaatttttatctttaatttggtctaaatctttagcgatgaagtttgaaattttaacactgtaattcatgtcttcttttgatttgtttaaatcatctttatttttaggactaagtgttaaagtataaacaattttaccgtcttttataactggataatagtaactattatcttcttcaccattaaatttataaattttaaaagcttcgccaagttcatatttaccagtttttgcattactttgtttatctaatgctttagcataaccagcaaattgttgttgtgctagatcttttactttttgaggtactttgtcactcttaacattaatttctagctgtttagagtgtgaatcggctttggctttattgttattagcaaatgcgcctagtgataaaataagcattgaaaccattatgatgcttataatattgaatactctagatttacatgaactattcatataataccctccatttaaatcaaaatattttacgttgctaagactttgcttctattttatctagacgaacttaattgttaattaagctgcatctggattgtctgaattattgttatcgccattgtctggattatcagggttgttagggttgtcagggttatttggttcatctgggttgttagggttatcaggattgttagggttatcaggattatctgggttattaggttggtcatcgttggcaaaatggatatcttcaatattttgttttaagaagttgcgtacattttcattaataaataccgcaccattaaattcatttggtacaccgccccaatgaattccgatcacttcatttttttcattaaatacaggtgaacctgaattaccaccagttgtacttaaatcatattgcatagcttcgcctttgaggtaagtgatttttcctttactttcccacattgttgctacaggtttatcaccaggatatcctgttacagtaatattttggttaacttgtgtttcagcattattactcattgttgctggtttaactacttcaccaatatgtttgttttgctcattaggggagaatttaactattgctaaatcaccttcgcctgaatatttagtgatttgttcagcagtgaaaccaccatttggataattgtcttggttaattgcagaagggaatgcttttaaagcatgaggatcaccgtgcgtagcatctacgacgtgtttatttgttaaaagagtatctttacctacaactacaccggaagcaataaatgtaccagtaggtgcttcaacttgaatataagttacgggtgcataatgaccattcgttgtatctgtgatttggtgacgatcgttatttggtaatataacatttgcgtgttcacgttgttctaatggtttaaggttaccgcctttttgaatcttaggtgtttgctgtttgcttgactgcgtttgttgtggatgattgtccatagcctttgaagataacgcgtttgctgctggagaactcacaagtgtcgctgttgtcaaagttgcaacgaataaagaactaacttttaaaaatttacctttcatctaaaaacctccaaaaaatttatttacaagttaaatataacactaaaaatttttaagtcaataagaatatataaataaattaaaaagtttttgtaaagattagagtttacaaaaacattaaggtaattaaaattgaattgtattatactttattcaattgagttaaattgataagatcgtcaattgtttgcatttatctaaaagaataaataagaaaggaattgagagcgaatggaaagtatttgtttataataataaatagtaacttttgaataataattgtttggccaaaggtagattaatatgaatggtgatatattatttgagtgcttaagtttcgaagaacaattataagttagcatattaaaaccttttgatagaatcattttgagtgaggtgtttaaaggagaggaatataactcggtagtatttacagtctctatagagtattatttaaaacttatagaatataaaaaactgaacgtactatgaatttagttcacgacgtccagttcaacatatcatttttatttagtatttaaatatttagcaagtctcttcataccttcttttaaaacatccatttcataagcataggaaatccttacaaatcctttaccgaattctgtaaaggatgagcctggaacgattgctaaatgtgttgattcaagtaaatcgacacaaaattcgaaatcgtcatcggtgatatgtttaatacttgggaaaatataaaacgcgccttcaggttgagcggtaatctcaaaacctaatttagttaattcagatactaaataatttcttcgttctacataagcttcgttcatatatttaggagcttctaatccttcgttaagtgctgttatacatgctatttgagctggaacattggcacaaatacaattataggcgtgcataaatgttaatttatcaatcaaatattgaggtcctaatagaaaaccaattcttattccggttgctgagtgtgatttacttaaaccaccaattaatattaattgatcacgaatgtcttcaaattcagcgaaggatacatgtttaccactaaatgtattttcagcataaatctcatcgctaataataaataacggatatttttttaatacatttacgatatttaaaacttcatttctttttaaaactacgccagttggattagtcggataatttaacaagacagcttttgtctttggagaaatatgactttctaatgcatcaggtgtaattttaaattgtgttgctgttgtatcaatataaattggtttaccacctagtacttcgatgagtggtatgtagcctgcataaattggtcccggtattataatttcatctccaggctctatgatagaacgtaacgttgtgtctattgcttcacttgctccatttgtcacaataatttcttcaggatcataggaaaaatgataacgatttttgaagtattgactaattgcttcgcgagtttctaataaccctttattgtgagagtatgatgtcttgtcattgttaatagcatcaatatatgcctttttcacaacatcaggcatcgggaagtctggttggccaatagttaaattaacacaatcatccaaattattcatacgatttgaaaattggcgaatacttggtgctcttaaatatttagaattagaatttaaagaaagtttcatttgtgacacctcaaatataaatcaaatattgtctaaaaatttagaaattaataatatcataacatacttttaaagcaaaaaagggtaaattacttaagctttatttgaaaaacgaaaaatgtctaaatacactgtagtaactacttttcaaaatgaataaagtggttacagttaatgtacttagacagtataaaattatgaatctttaaactgtgatggtctttgtaaattaattattggatttgtccatttacaaacaaagtttgtagataatacatatacgatgattacagatatacttattaaataaagataagtcattaatgatataggattatcgaatgggtaccattcaaatcctctaacaatgccaataattaaaccatgtaataaatatacgtatagcgtacgactaccaatataagtatataattttttctttgttgacattaaatttagaaacgcagtcattgcgattaatataattccatataatataagtcgtttaaaaggactgaatatactctgtccttcattttcaagtgaagtatatggtgaacttcccaataaccaatctgcattgataggatgaatcacgtaaacgataaaaaacaaaataaaggtaatgatagatactggtattagttttttatttttaaaaatagccgtatgttttttggtgaaaatgtaacctagataaaatattgggaaaaatacgattgtccttgaaatgcttaagtagctatcgatgttatctgaaaaacctgctccaatagatataataattgaaactgatagcactttatatggattaaatcttctaactattactaaaatgacatgaaagaaaaatagcgtgatcaaaaaccataacgcaaatactgggttaaaaggatcaagttgtaattcgtcacttttacctgttaagaaataataaattgaaaagaatgcaaaaaatatcatataaggtactatcaaacgttttgaaattttttctaaatagtatggtttatcaatatttttcgcgaaataaccagatataaacaaaaatgttggcatatggaaactataaataactaggtataatgctgataaatatttatcgccactagtgtagggttgtaacatatgtccaaatacgactaataatattaaaattgctcttgcgttgtcaaaaaaataatctctctcttttaatgaagtcatattttatctcctttatgtccataagactcttactaatttattatattttgtattagttatgcaacaaatttgtctattgtgtcgaatagtattgtaaaaattataaaaaaagcatataatattataaataatatgtagtggagtagaacaacatgtataaacaacttgaaaaacttattacactgactaacaatgacttaaacttagtgaatagaagatttggacaacgcacggatatcaaatctgaacagctagaacttctccgtattttatttaattacgatcgcttatcacagtatgatttgacgatgaagattagcagggaacaatctatagtttcaaggtggattaagaaattagttttgaaagggtacatcacaagtcaacaatctagcgaagatttaagatgtaaagaattaattttgactgatcaagcacgtacattaatttcacaaataaataatgcacgttgcgaattgattgaagcaagatgtcaatgtttatcggaagtcgaattagacaatttaaatcaattacttgataagttaaatcaacgacgcatatcgttgtaacacgacaatagcaaacacataatttagtgtcgttgtgcacacaacaaaaattgaatcatgaattacaagcaaaagtagcggtgattgttaaaattgatggtaaacaatcaccgctatttttgcttgtgtatgtataaaaaagggatcaaaggtcatcccccatgattgatagtgggggatgacttttgatcctatgttcatgttgcttatttatattgtgggatgtcgaagtatttgccgacttcgccaattttatcatagtagcctttgatgattttagcattgatgttagcccaatctacatctgtagcatattggtgtgttcctggatgtgcaggattccatctcattttgtaaagtgtattttgaccagcttttacatatgagttgccgatgaatttagcaccaccaacgattgcttttgatactgtgtcccaaccagcttgtttagcatatttaataccttcacgtaaaggatcgttatcatatgcagcaataccaaatacgttatggtatttcgtgtttgagttagttacaactttgttgttcactacatctgcacctttcgctaattgagaagtaccgttacctgtttctaatagggcatgtgagataagataaacttcattaatgccatacatttgagcagctttgttaaatgcagcaccttggttttctaatacacctttaccttttaagaattgattaattttatcaatagaaatattttgtggttggtctaagcgtaagaattgatattttaatgctggatcttgagctaaacgcttcgtatccattgcatgcttaacatcattaaagttagcatctgtccacttacctggtacacgttgtacttgtggtttatattgtaaaccagcttgtatttgagcaacttggtttaatgtcatacctgtttgattatacttaattaattctttagctaaatcagttgatttaatccatgctaatttaccgttagataatttaccatagtaccaagtttgtccattaatgacttgttctttaacaactgcgaatggttgttcattaaatgcttttaatgagtatttagctgtatcagaatttggtgttacatagtaataaccattaccatttttaattacataagtgtagttataatctttggcagctgatgtagttggtttcacagcagttggtgcagttaaatcttttgcatttacccaaccagtgcggttattaatagtaccgtataaataaacatctttgcctacagatacttgtttcgttgcattaaatgtaccttgagcaatgttattgcctgttaaaatgacttggtttttagtaccccaaggaaccattgataagccgttatttgatttattaacagtatatttttgagtcgttttaacttctttgcctaagttttgaacatttaagtcttttacattgaaccaacctaatgggatgttatggcttgtattgtttaataatacatacgtttcattaccatgagcacgctcttttgttacatagaacgtacggtctgcatatttcgcaccgtttttcgctgttttttcataaacagaagcacgaataccagtgttgtttggtttaacttgagcaatcttgctaactgtttgagtcgtttgtggtttagtaacagtataagcttttacagctgtttttggttgtgctactgcttttttaggtgcagcaggtacagctaaatatgctttacttacccaaccagatttaccatttacagttccaaataaatagatagatttatcaatttgttgttgcttagtcgctttaaaagtttggttacctgtaccagaaactgcaccagcttcttgtttataagtgccccaaggtactgaatataatttagtgcctggttttactgtatatgtttgcattacatttacaggtgattttgcattgttataaataacgtcaccttgtttaacccaaccaattaaagttggactattgtaatctttaactaagtagaatttgtttccacctaaacttgcttcttttgttacagcaaatgttttttgaacttctttcgttggcttaccagttttgtcataaactgtagtgaataagccattgtttttagcattaatttgagcaacaccgtttaatgatgaaactgttaatttattatttgttgtaggtgttgatggcttaggtgttggtgtaggcgtaggtttagcagtatcaactaaatatgctttacttacccaaccagatttaccattcacagagccatataaataaattgatttatcaatttgttgttgctttgaagccttaaatgtttggtttccagagccagacacactaccagcaacttgtttagatgtaccccaaggtactgtataaagtttcgtaccaggtttgattgaatatgattgatttacatttacaggtgatttagctgtgttgtaaaccacatcgccttctttaacccaaccaaatttattaccagaattgtaatcttgaacaagatagaatttttgattacctaatgtagctgttttagatacagcaaatgttttttgaacttcattagttgctttaccagttttgtcgtatacagtagtatataaaccactatttgttggtttgatttgtgcgacaccattgtttgcagcaactgttaatttaccagttgatggtttcgacggtgttgttggttttgatggtgtagtaggggtagttgtagattgcgtaccccatggcgccactttacccatttttattaaatatttttcattaattaagtcatataattgatcataactataattatgacttcttaaatatccatgtggatcggcatggtcagtaccacctaaatatttacttacagcgtagtgagtccatactgtaccatttccatcatactcagcactgtctggttttaaaccataatattgtaattgtgtagctgcatagtcagcatagttattcattgaacgtgcaaatgaagcatagtcgtgtgtgtgtacgatttcaacattgatgaatctagggttaccgactgcaccgacaccccaagataagtaatccgttggtgctgtttcgattatacgatccccatcaacaaatgcatgtacgaatgcgttttgatagttatttttcatataactaatttcaccatttatcgtcgaacgatcattagctgtatcatgaactacgataccttcaggacgacctacgccgttacggtatgcgtatttagggaagtaagatgtataatcttcttcaattttaggtgcttttaagttatttttacgaatgtaatcgttaattgaagagtttacttgtggtttatattttggcaaactcgtttttggtgttgcagcaactgatcttggttgtgctgaagcgctaaaagtagttactttaggtgtcgcttcagttttagctttaggtgctgatgtagttgcagctttaggtgctgcggttttatattgcgtttcaagagctgcaggtttagcagctgatttaattaattctggattaatttgattttctgaattatcatcttcatcatcaactaaactataaccagcatttgtaacattagtgttagttttaggtgctgtagtgcttgttgactttgcaacaggctgcgtattatttgtagtcgctgattgattagcacgagtgtcaccatttacttgtgcagtatcaactttttgacttacttgagcattgcctgttttgttatttgctgtttttggttggacaatagcagggtcttgatatacttgagtgccagaaatgttttgcgttggattttttacctcagcttttgcttgttcagtagttgctttaactttattactatctaaaacgtttttattagtagtttgatcttgtgtcgtctcagctgcttgaacttgatgtgcagtgactgctgaacctacaagcgttaatgcaaccattgatggtagtttgtaattgaattttttcgccattctatttattactcctaacatttattaattattactaacattatagtacctgttttatatacctgtgcgtatttaaccaatttgtaatatactcttaatttacattttcactgtaaaaaaatgaaaaaaattttgaatctcaatggtgacgtgacaaatcaaatagaattgatgtcaatttaagaattggtttattacaaatgtttctaaaatagatacaactttttttaattaagcgaggttaacttttttgtcatttcaatatgctcgatgccttcctcaagaaatatattacctctcattttaaagtttaaactttcataaaatgggatagcatgacattgggcattcatagtagctacgtaaaaaccttcatctttagctaatgattctacagcttgcataagcattctacccattccttgtccacgatgtgatttcatcacagctactcgttctattttgacagttgtttcattaatagggcgtattcgagcagtggcaactggctgtccattatcatatccaatgaggtgaatagattcagattcatattcatcaatttcactttcctcagggacgccttgttcttctacaaacactttctttcttatatagaagcaatcttctaacatcttttgattgtttacttttgaaaacataaaattcctccacatcctaacaaaatcatttacatttaatttactaataataacatagaataacgattgttattttcctcaaaaataattagacataaaaaagctataaagatgattgttgtgaatcatctttatagctaattaattattaatgttatagtgcttcttttctaataattgctgtatattgccaaaagattcgcatttgagcaatattccaattattcattcccattgtaaatcctgaaggcttaaatatattcacatcagttacttctaaagctgctgcaactaaatattgtaatggaatgctaagtgatttcattgtttcggtaatgccattttcatcatatacccatgaaaatggtaactctgattcgaaaacatcaacactattgaaaatttcaggtagggctaaaatataacatgcaccatctacaataggattgtcgatactatttttgtaataaattaggagtgcttcatagttttctcgatgctcatgattgacgtaaaaaaattcacttctaaaatgagccatatcttggctatgaatgatttgttgttctaacatattaaacatgccatttatatttgcaatcttttcgtatgtttttctactcatgtatgatgctcctttcataaatagtaaatgttaatcgtcatataatattaatttacaacaccattttggttatttgaagcttgtggcgcttgttgtgtgccaccttgattttgatttgagttttgatctgtagcaggttgttgttgattgctggaatcactgttattagttgaatcactgttctcgttagatgtcttatctttatctgtcgtatcattttgttcttttctcaataaactattatctaaaggcgttaatggtattaatgaaccataatgattaatgacacgttgatctaagaaatcatttttatcattaataggtgataattctaagtctttacgaagtaagtttgcatatttttgaatgctttcaacacttggatgataatagtaaataccatttaacatatcatctttaccttttaattgcgcagttttaatttcaacatcatttgttaagtacatttttgctaaagctttaatttcagagttagttaaattatgctttgcatttttacctacaatttgaatcacgttatcaagtttatcaatagaatcaacttcctgtgctttttggaataaaatcttaattaattccatttgacgttgtccacgttttaagtctgaatcatgatgtctagttctagcaactgctaaagcctcatcaccatttaatttttggtacccttttttaattttaatcttaccagtatcatctgtgttaggttcatttaagtcgtatggcacatcatagtatatgccaccaagctcatttacagcctcgacaaatgctttcatattgactctcacataataatcaacaggtacattcatggtagcttctaccgaatccattgcggcaattggaccaccatatgcatgtgcatgggtaatcttatcgtaatagccaactttaggaatgtagctgatagtatcacgtggaatactaagcattctaatttgatgttttgattgattaaaagtagttaaaatcatagcgtctgatctagagtgttcagcatcctgtcctttttttcttcttccatcgttatcatcgatacctaagaaaagaatagagataggttgttcttcgggattgactttattatctcttaagttggattgacgattagcatttttgctgtcttgagaagattcgaatgcatcttgggacgttttaaaaagtaacgtagcgaagactattggaacaacaatgagaaccaatgctagaaggatcaaaaagtattttaaaaatttattcatgattgatgctcctatattaaatttttgttaaatcataatcataattttaaaatataattagttgaacgatatttatacaacttcattactaatacattatagccttaaattgtagtactttatagtaaaaaatacaaatgttatgtcaaagttccttgtaatttgaatgttttgttaaaatcaaaaagcatttttaaaaatataatgcgactttagtatgatgtcttaaaaaatttaaaggcgtaatataaattcgagtgatttatacaaagtgataaggtataattaattttgttgtatagataacatattagaaaaacttattactatgtagcgtaaagcataaatgaatgataagttaatttttgtaagttgtattattaggcatctaggttcaaatttttaacgatttaaatatataaaatgaatacattgtgaggcaattatcaaatgaaatttaataaagtaaaactagttatacatgcgtgtgtactattatttatcattatttctatagcgttaatttttcatcgattacagacgaagacacattctatagacccaatacataaggaaacaaaattatcagacaatgaaaaatatttagtggatcgtaataaggaaaaggttgcgccgtctaaactaaaagaggtatataatagcaaggatcctaaatataagaaaattgacaagtatttacaaagttcattatttaacggttcagtagctatatatgaaaatggcaaattgaaaatgagtaaaggttatggatatcaagattttgaaaaaggtattaaaaacacaccgaatacgatgtttttaataggttcagctcaaaaattttcaacagggttactgttaaaacagttagaagaagaacataaaataaatatcaatgatccagtaagtaaataccttccatggtttaaaacatctaagcctatcccattgaaagatttaatgttgcatcaaagtggattatataaatataaatcctcaaaagattataaaaatttagatcaagcagttaaagcgattcaaaaacgtggtattgatcctaagaaatacaaaaagcatatgtataacgatgggaattatttagtacttgcgaaagtaattgaagaagttacaggtaaatcttatgctgagaattattatacaaaaataggagatcctttaaaacttcagcacacagcattttatgatgaacaaccttttaaaaaatatctagcaaaaggttatgcttataatagtacaggactttcattcttaagacctaatattttggaccaatactatggtgcaggtaatttatatatgacaccaacagatatgggtaaattaattactcaaatacaacaatataaattattcagtcctaaaataaccaatccattattacatgagtttggtacgaaaaagtatccagatgaatatcgatatggtttctatgctaagccaacattgaatagacttaacgggggattctttggacaagtctttactgtttactataatgataagtatgtagttgtacttgcattaaatgtaaaaggaaacaatgaagttcgaatcaaacatatttataatgatattttaaaacaaaataaaccttacaatacgaagggtgttattgttcaataattaatatagaagatataacatgtatatggcattaaggcatcgaccttatctgaccagtatacgagttatatcttcttttttatagtggtaaaaagtttaaagtataaggttgaagaaggatgagtttaaaaatatgtgttaactgataaaaggggaaatcatttggtgagttggcatcagactaaaatgaatgaagacgaatacgttggtccatgcgtggtgtgaatgttttctaaatctaactggaaatgataatttaataatgtacacttttgattgtttaaacatgtacaatttttaaaaacctagggataattttattgacgtgaacaacattgagattatctttagacataaatatggattttgaagttactatatttattagttgtggttgttaatgtattaattgaattgattataatgattgtcttataagatatagaaggggacttaaccatttaaaaattgaaggaaaataaaaaccagctaacaaaagtgttagctggttaaactttacattattaaaatgttgtttataagtgtgaagagtgaccgccttgcataacccaatatgttccgacaacgaaacaaagtgtaattacaagagcaaagataactttgaatgtttgtaaacgtccatctttaccttcagttaaatgcatgaacattaataattgaagtcctgcttggacgaatgcaaagccaaagataattgtcaacttcgcgtggaatgttaatgacgtgtatagtgttacgtaaactgctaaaagcgttaatacgatagatgcgataaatcctacagtatgtttcattattgtactcatccgctatacaccatccctatcatatatacggcagtaaagatgaaaacccaaacaacatctaagaagtgccagtataaacttactataaataattttggcgcattatatttgtctaatccgcgtcgttggatttggattaataaacaaatggcccaaacgatacctagcgatacgtgacaaccatgcgttcctaataggataaagaaactagaccagtaagaaccaattgttgggttaacgccttctgatgcatagtgtgcgaattcataaatttcgaatccaacaaagactaaacctaaaagtaacgtaatgatcatccaaaacatcattaacttttgtttttcttggcgcatgtagtaaatagcaataccacatgtgtaagaactgaataataatgcaaacgtcattattaaaacaagaggcaattcaaataactcagtagtcattttacctgcataatcgccaccatgttgcaaagttaatagtgtcgcaaatagggtaccgaataacgcaaattcggctgtaatgaaaatccaaaagccaagcttatttaattcgccttcatgtgtgcgtgaatcaatagtgtttgtatcatgactcatgacttacagcctccctttctttaatacgcgcttctcttaatctagcttcagtttctgcaacttcagcagcagggatatgatatccgtgatcgatttggaaactgcgataaatcatagtaccaaaaataccgaataaacaaattaatgctggaattacagtttcgaaaattaagaagaaaccgccgatagtcataaagataccaatccagaatccaacaggagtattgtttggcatatgaatgtctttgtaattatggttgtctaagtaatgacgaccatgttctttcatatcaacaaatgtgtcgtagtcattccaatctggtgtaatggcaaagttgtatttaggtggaattgctgatgcagtagtccactctagagtacgaccaaggccatcccagttatctccagttgcttcacgtggagatttgaagtgactgtatacgatactaacaacaaggaataagaatccgattgccattaataatgcaccgatagttgaaattaagtttaataagaaccaaccatctgatggcatataagtgtataaacgacgtggcataccatctaatccaagaatgaattgtggtaagaaacaaacgttaaatccgatcatgaagaaccagaagcaccatttgtttaatgtttcgtttaatttgtaacccatcatctttggataccagaagattaaaccagctaagcaggcaaatacaacaccagtaaccaatgtatagtggaagtgagctactaagaagtacgtattgtgatattgatagtcagctgatgccattgctaacattacacccgtaacaccacctaaaaggaagttagggataaatgctaatgagaatagcattggtgactcaaatgtaatacgtcctttatataatgttaataaccagttaaacaatttcacaccagttggaataccaatcagcattgttgaaattgagaagaatgagttgattaacgcaccattacccattgtgaagaaatggtgaacccaaactaagaaactaaggaacgcgataccggcagttgcccataccatactttgatgtccgaataaacgcttacgagcgaatgtcgggataatttctgagtaaataccaaatgctggaaggataacgatataaacttcagggtgcccccatacccagaagaagttagcccaaagcattggcataccgccatgtgcaactgtgaagaatgctgtgtcaaatattctatcagttgtcattaatgctaacgctactgttaaaggagggaaagcaagaataacaattaatgtagtaataaatgttgttactgtaaacattggcatttgcataaacttcatagttggtgttttacatcttaaaattgttacaaagaagttgatacctgtagctaaggtaccaagccctgaaatttgtatagctattaagtaatagttaacacccggaccaggactgaattcacctgctagtggcgcatagtttgtccaaccagctgctggtgaaccaccaataataaatgacaggttgaataaaatcatacctgcaaagaatagccagaaacttacgttgtttaatactgggaatgcaacatcacgtgctccaatttgtaatggaacaacgatattccataaaccaaagataaatggcattgccatgaagataatcatgattacaccatgtgtactaaaaatttcgttatagtggttagattctaaaaatttgttatcaggtactgttaattgcgcacgaataagtaacgcatcaataccaccacggacgaacattaatacggcacagattaaatacataataccgattttcttatggtctacagatgtgaaccattctttgtaaagatatttccataatttaaagtaagtaattactgcgattaaaccaataactaagaatggggcaccaatttgtgccattgtaatcatccagttacctttaactagtaattgatcccatggaaaattcattaatgtccacctccatgatcatcattgtcttgatcttgcgcatcttttgaaattttcttcatttctttcgcatttttcgattcatctttcttgaactcattgttatatggttcgtcatttccaagaatcatcaacttcataccatgtcgtttatagttcgcatttgtaatttgagctttacgagcaggtattaatggtttgtctgatacatctttaaacatattttcttcactagtgaagtttggatctttcaattcgaaattgaaacgtttatatgcatagaagatgtattctggatcggctgctggatcaacaaacgccatatgtgtaccattaaattctaaagctttattaggtgtgcttggtaataattgtttatcaaatgtatcttgatctaacgttttcttacctttaacttctttcacccatttgtcgtagtctttttgactaacggcatttactttaaatgtttgacgtgagaatccttcaccattgaagttagagttacgacctctgaacgtaccagtttgagatgcttctaacgtccaattcattgtcatgccagtcatggcatatttttgaccacctaattgtggaatccagaaacttgtcattgtatccatagcttgaagcttaaatacaacaggacgatctttagggattgttaatgtattaacagtctctatatgttcatctggataagcaaagaaccatttgtatcctgcacttactgcatatacaaccattggatctttctcactcttcggtggtttttcgtaatcgtataaagttttaactgtaggaatagctaaagcagcaacgattatgataggtattacaaaccatattgtttcaatgatggcattatggtgcatcttaccagattcggcattcttattataactatacttgtaaataaaaatggcgaacatgccaagtacaacgaaacaaataacaagcatgaagacgattgaataaagaatcaagaacttctgactacttgctactggcccttttgcgttgaaaatttctatatttgaacaaccactaagtaaaattagtgtgccaaataatagaagcaaagacttaaattttgacacttttttgacctcctaatactacaaatgtagggcttaacattaattttaagttattacacaatatttacaagggcttatgggaaaaaaattaataaaattgtatcaaaaatgttgataaatcaaggtgtgacgtgggttcacacatttgttaaaattatgtgtacattttgtgactaatagcgtttttgaaaaaattgcttcatatttaaaaggaaagttgagaatagctttcaattaaaggttaattgaatgaaaataaaaaaagtttgaaattgtctaataaattgaaaatgatggctagttgattgaaaggaagcgcaaacattttaataaggaatttgccaaaagtaatttatcgttaaacaatgaaaagtggaaatttgtttgttcaaaatcaaaacatttttttaaaaagagcagttaagttttaataatttgataggtagtcctttggtatacagaaaaaatacaatatttgggttaaagttgcagatgaagttagaataacaaataaaatggtagcaaaacatgttcgtttgctaccattttatttgcagtatagtgatgagggctatttaacctcaatatacctagtggaaattttaattgcaccatctgaatcagtgacatgatatttaatttgatatttaccagatttagatgtatcaatttggccatcgactttaattttatcggttaaatctccatcttctttatcaaatgcacttatgccgtttagaaggttataatcttgacctttcttaataacgatatcattagcgcctttaatttgtggtgtagtattcgtcgttgcatctgcatttaaatttggtgttactagtgtagcagaaacaccgagggctgataatgactgtaatagtttattcataatgtaacctccgaatgataagtcatttctgagttagctttactataccttaatttatattatttacacatcatactatagtcctaatcttaccctataaagaatgaaatttaaatataaatttataaataatgaggaaataattattattttgaaaatctgccacaattgtaaaattaataatttagggataatttgaaatcaaatataactttattcgacagtttgaacttaaatttttgtgtatcaaaacaataagaaaagggaggcgaaaatgataaagaaccactaatgattaactatgtagtagtactttatcatagtcacagcttctgtgttggggcccatccccaacttgcacattattgtaagctgacttttcgtcagcttctttgttggggccctgactagaattgaaaacttgttacaagcttattttcattcaattaactactgtctatataaaattgttgagccaagtacaaagtgaaatgctcccttcaaagccttcatttattcaatgtctactttgaagggagcatttgatcgattaatgtcccagatttttcttgttattcattgcaattgcaaaataatatttaatgtgggttaaaagacttcattaaaactcagttattagggagtgggacagaaatgatattttcgtaaaatttatttcgtcgtcccaccccggcaaggttgactagaattgaaaaaagcttgttacaagcgaattttcgttcagtcaactactgccattataactttgtagagcatagaacattgatttatgtctcaggctctttacgaatcaatacctcgacgcattttttctgcaagcaaagtattatttaataccatagtaattgttaatggaccaacgccaccaggaactggtgtaatagctccagcaatttctttaaccgcatcataatcaacgtcaccttttaatttgccattttcatctggcgtattgccaacatcgataattactgctccttctttgaccacatcttttgttactaaaccaggcttaccaactgcactgacaatgacatcagcatcttttaaatatgatgccatatcttttgaacgagaatgtaagattgttactgatgcatttttttgaagtagtaacttagaaactggttgtccgacaatatgacttcgtccaattacaactgcatttttaccttctaaatcaatatcagcatgttttaatatttccatgatgccgagcggtgtgcaaggtacaaaagtttgttcatcgatatataatttccctatatttattggatgaaaaccgtccacatctttttcaggattgattgcttctaatattttctgttcgctaacttgttttggtaatggtacttgtaccaaaataccacttacagaatcatcattatttagtctatttagttcgtttaatacttcttcttcagtagctgtttcttccaaatgtacgatttctgaaatcataccaattttttcagctgctttcttttttgatctaacataactttgactagcgccatcattaccaactaatataacggataatttaggtgtaaaacccttttcttttagcgcttcaacttgatcttgtaacccctgtctgtagtctttggcaatttgtttaccatctaaaattttagcaaccataaaaacttctcctcctattgtcaatatcctaactttgttagtttataaaactaatttacatagcaaaagacgtaaattcaaacaaaaaatcaaaataaagttcgatttttgattgaaaaagcagaaattgcttgttatgctatatctataatatacaactaaagtaattcacaattcaaacttttgaaagggtgtacaaagtgaaagtagcagtcattatgggcagttcttccgattggaaaattatgcaagagagttgtaacatgttggattattttgaaattccgtacgaaaaacaagtagtatccgcacatcgtacgccaaaaatgatggttcaatttgcttctgaagcgagagaaagaggtataaacattatcattgcaggcgctggcggtgcggcacatttaccaggtatggttgcatcattaacgacgctaccagttattggagtgccgattgaaacaaaaagtttaaagggtatagattctttattatcaattgttcaaatgccaggaggtattccggttgcaacgactgcaattggtgcagcaggtgctaaaaacgcaggtatacttgcagcaagaatgttaagtattcaaaatccttctttagttgaaaaactaaatcagtatgaatcttcgttaattcaaaaagtggaggacatgcaaaatgaacttcaataaattaaagtttggtgcgactattggcattattggtggtggtcagcttggaaagatgatggcacaatcagctcaaaaaatgggttataaagtggttgtattggatccttctgaagattgtccatgtagatacgttgcacacgaatttatacaagccaagtatgacgatgaaaaggcactcaatcaattaggacaaaaatgtgatgtgattacttatgaatttgaaaacatttcagcccaacaattaaaactattatgtgaaaagtacaatattccgcaaggttaccaagctatacagttattacaagatcgcttaactgaaaaagaaacattaaaaagtgctggtaccaaagttgtcccgttcatttcagtaaaagaatctacagatattgacaaagcaattgaaacattaggatatccttttattgtaaaaactagatttggtggctacgatggcaaaggtcaagttttaattaacaacgaaaaagacttacaagaaggttttaaattaattgaaactagtgaatgcgtagctgaaaaatatttgaatatcaagaaagaagtatctcttactgttacaagaggaaacaacaatcaaatcacttttttcccattacaagaaaatgagcatagaaatcaaatacttttcaaaacaattgttccagcgagaatagataaaacagctgaggcgaaagagcaagttaataaaattatccaatcgattcatttcattggaacatttacagttgaattttttatagatagtaacaaccaattgtatgtgaacgagatagcaccaaggcctcacaattccggacattattcaattgaagcatgtgattattcacaatttgatactcatattttagcagttaccggacaatcattaccaaattcaattgaattattaaagccagcagtcatgatgaacttactaggtaaagatttagatttattggaaaatgaatttaatgaacatccagagtggcacttacatatttatggtaagtctgagcgtaaagatagcagaaaaatggggcatatgactgtactaacgaatgatgtaaaccaaactgaacaagatatgtacgctaaatttgaggggagtaattaaagcatgacattattatatgaaggaaaagcgaagcgcattttctcaacaaatcaagaaaatgaattaagagttgaatataaagatgaagttactgctggaaacggggctaagaaagacacaatggcaggtaaggggcgattaaataatcaaattacttctattatatttaaatatttacaagaaaatggaatagaaagtcactttattaaacaattatctgaaacagaacaattagttaagcctgtgaaaataattccattagaagtagttgttcgtaatattgctagtggatctattacaaagcgtttaggttttgaaaatggtgaagtttttagagaaccacttgtagaatttttctataaaaatgatgcgttaaatgatccgttgataacggatgaccatgttaaattgctcaatatagcatcagatgaagatattgaaatactaaaatccaaagcattaaagattaataatgtgttgaaacaattaatggatgctatgaatttaaaattagtagattttaaaatcgaatttggaaagactgagactggtcaaattttgttagcggatgaaatatctccagatacatgtcgaatttgggataaagctaccaatgcaaactttgataaagatgtatatagaaataacactggatcactgattgaaacatatcaaatatttttaaacaaattggaggatttaaaataatgaaaacaattgaactacatatcacattacaaccacaagtattagatacgcaaggacaaacgcttactcgagctgtacatgacttaggttatgcacaagtgaatgatattcgtgtaggaaaagtattatatatgacagtggatgaggttagtgatgaaaaggtacacaacattattacaactctaagtgaaaaattgtttgcaaatacagtgattgaagaatatagctataaagtgttagatgatgaaaaggagaatgcataaaatgaaatttgcggttcttgtttttccaggttcgaattgtgatagagacatgtttaatgctgctattaaaagtggtgttgaagcggaatatgtagattatagagaaacatcactaagtggatttgatggcgtacttattcctggtggattttcattcggggattacttaagatctggggcaatggctagtgtagcgccgattatttcggaagttaaacgtcttgcagctgaaggtaagccagtattaggtgtttgtaatgggtttcaaattttaactgaaataggcttattacctggtgcattattgcataacgattcacatttatttattagtagaaatgaagagttagaaatagtgaataatcaaacggcatttacaaatctttatgaacaaggtgaaaaagttatatatcctgtagctcacggtgaaggtcattattattgtactgatgaaatatatcaacaattaaaagataacaatcaaattattctgaaatatgtgaataatccgaacggttcatatgatgatattgcaggaattgttaacgaaaaaggcaatgtatgtggcatgatgccacatcctgaaagagctttagaaacgttgttaggtactgatagtggtgtgaaattatttgaagcgatggtaaaaagttggagggaacaacatgtctaaatttatcgaaccaagcgttgaagaaattaaacttgaaaaagtatatcaagatatgggattaagtgatcaagaatatgaaaaagtttgcgatattttaggcagacaacctaactttacagaaacaggtatcttttctgttatgtggagtgaacattgctcttataaacattctaaaccgtttttaaagcaatttcctacgtcaggtgaccatgtgcttatggggcctggtgaaggtgcaggggtagtcgatataggtgataatcaagccgtagtatttaaagtagagtctcacaatcatccatcagcaattgaaccatatcaaggggctgctacaggcgttggtggaatcattcgtgacattgtctctattggggctagacctattaatttgttaaacagtcttagatttggagaattagataataaacaaaaccaaagattacttaaaggtgttgtaaagggtatcggaggttatggtaactgcattggtattccaacaactgctggtgaaatcgaatttgatgaacgttatgatggcaatccacttgttaatgcaatgtgtgttggtgttatcaatcacgacatgattcaaaaaggcacagcaaaaggtgtaggtaattcggtcatttatgttggtttgaaaactggtcgagatggtattcatggtgctacttttgcatctgaagaattgacggaagaaagcgaaagtaaacgaccttctgtacaaatcggtgatccatttgtaggtaaaaaattaatggaagcaacacttgaagcaattacatttgatgaattagttggtattcaagatatgggtgctgctggtttaacatcttcatcgtctgaaatggcggcaaaaggtggtagtgggttacatttgagattagaacaagtgccaacacgtgagccaggtatttctccttatgaaatgatgctttcagaaactcaagaacgtatgttactagttgttgaaaaaggtactgaacaaaaattcttagatttatttgataagcacgaattggatagtgctgttataggtgaagttacagatacaaatcgttttgttttaacatatgatgacgaagtttatgctgacattccagttgaaccactagctgatgaagcacctgtatatattttagaaggagaagaaaaagattataatacttctaaaaatgattatacacacatcgatgttaaagatactttctttaaattacttaagcatccgactatagcatctaaacactatttatatgatcaatacgaccaacaagttggtgccaatacgataattaagccaggacttcaagcatcggtagtacgtgtggaaggcacaaataaggcaattgcttcaacaattgatggtgaagcgcgttatgtatataacaatccatatgaaggtggaaagatggtagtagctgaagcttatcgaaatttaattgccgtgggtgcaacaccattagcaatgacagattgtttaaattatggttctcctgaaaagaaagaaatctatcaacagttgatagattcaacgaaaggtatggcagaagcatgcgacattcttaagacaccagtagtttctggtaatgtatctttatataacgaaacgaaaggtacttctattttcccaacaccagttgttggaatggtaggtttgattgaaaatgtaaattatttaaatgattttgaacctcaagttggagataaattatatttaatcggtgatactaaggacgactttggtggtagtcaacttgaaaagttaatttatggcaaagttaatcatgaatttgagtcattagatttgagttcagaagttgaaaaaggtgaatcaatcaagaccgctattcgtgaaggactattatcacatgttcaaacagttggtaaaggtggcttactgattaccttagctaaactaagtgcgcattacggtttaggattaaaatcttcaatagatataacaaatgcacaattgtttagtgagacgcaaggccgatatgttgtttctgttaaatcaggtaaaactttaaatattgataatgcaatagaaattggacttttaacagatagtgataatttcaaggtaacaacaccatatacagagattagtgaaaatgtttcagatattaaacaaatatgggaaggggcaattgctcaatgtttaactactcaggattaaacgaagaatgtggcgtgtttggtatttggaatcatcctgaagcagcgcaactaacatatatgggacttcatagtttgcaacatcgtggtcaagaaggtgcaggtatagttgtttctgatcaaaatgaattaaaaggcgagcgaggattaggcttactaactgaagcgattaaagatgatcaaatggaacgattaaaaggatatcaacatgcaattggtcacgtccgttatgctacttcaggtaataaaggtattgaaaatattcaaccgtttctgtatcacttttatgatatgagtgtaggtatttgtcataatggtaacctcattaatgctaaatcattgcgtcagaatttagaaaaacaaggtgctatcttccattcgtcttctgatactgaagtcattatgcatttgatacgtcgaagtaaagctcctacttttgaggaagcgttgaaagaaagtttgcgaaaagttaaaggcggttttacatttgcgattttaactaaagatgcgttatatggcgcagtagatccaaatgctatcagaccacttgttgtaggtaaaatgaaagatgggacatacatccttgcaagtgaaacatgtgcaatagatgtgttaggtgcagaatttgttcaagatattcatgcaggtgaatatgtcgtgattaacgataaaggtattacagttaaatcttatacacatcatacgacaactgcaatttctgcgatggaatatatttattttgctagaccagactcaacaatagctggtaaaaatgtccatgcagtacgtaaagcttctggtaaaaaattagcccaagaaagccctgtaaatgctgatatggtcatcggtgtacccaattcatcgctatcagctgcgagtggttatgctgaagaaataggtttgccatatgaaatgggactagttaaaaatcaatatgttgcaagaacatttattcaaccaactcaagaattacgtgagcaaggtgtgagagtgaagttatctgcggtaaaagatatagtagatgggaaaaatatcattcttgttgatgattccattgttcgcggtacgacaattcgacgcattgtgaaaatgttaaaagattctggtgcaaataaagtgcatgtgcgtatagcatcaccggaatttatgtttccaagtttttacggaatcgatgtttcaactacggcagaattaatttctgcaagcaaatcacctgaagaaattaaagattatattggcgctgattcattagcatatctatctgtagatgggttaattgaatcaattggtttagattatgacgcgccatatagtggcttatgtgtagaaagtttcactggagattatcctgcagggttatatgattatgaagcaaattataaagcgcatttaagtcatcgacaaaagcaatatatttctaaaaacaaacacttttttgatagcgagggaaatttaaatgtctaaagcatatgaacaatctggtgtaaatattcatgctggttatgaagctgtagaaagaatgtctagtcatgttaaacgtacgatgcgtaaagaagttatcggtggtttaggtggattcggtgctacatttgatttatcacaattaaatatgacagcgccagttttagtttctggaacagacggagtaggtacgaaattaaaactagctatcgactatggtaaacatgattcgataggtatcgatgcagtcgcaatgtgtgttaatgatattttaacgacaggtgcagaaccattatattttttagattacattgctacaaacaaagttgttcctgaagttattgaacaaattgttaaaggtattagtgatgcatgtgttgaaacgaatactgcacttatcggtggagagactgctgaaatgggtgaaatgtatcacgaaggcgaatatgatgtagctggatttgctgttggagcagttgaaaaggatgactatgtagatggttcagaagtgaaagagggacaagttgttatagggcttgcgtcaagtggcattcattcaaatggatacagtttagtgcgcaaattaattaatgaatcaggcattgatttggcatcaaacttcgataatcgtccatttatcgatgtctttttagaaccaactaaattatatgtcaaacctgtacttgctttgaaaaaagaagtttctattaaggcaatgaatcatattactggtggaggtttttatgaaaatattccacgtgcattgccagccggatatgctgctagaattgatactacatcatttccaacaccaaaaatatttgattggttacaacaacaaggcaatatagacacaaatgaaatgtataacatttttaatatgggtattggctatacggttatcgttgatgaaaaagatgtatcacgcgctttgaagattttagcagaacaaaatgtggaagcctatcaaattggtcatattgtgaaaaatgagtcaactgcaattgaattgttgggggtataacaatggttaaaattgcgatttttgcatcaggttcaggaagtaactttgaaaatatagttgagcatgttgaatcaggaaaacttgaaaatattgaagttacggcgctatatacggatcatcaaaatgcgttttgtatagatagagcaaaaaagcacgatattcctgtttatattaatgaaccaaaacaatttgattcaaaagcagcgtatgaacaacatttagtaacattattaaatgaagataaggtagagtggattattctagctggctacatgcgtctaattggtccagacttattagcttcatttgaaggtaaaatattgaatatacatccatctctattgccgaaatataaggggattgacgcaataggccaagcatatcatagtggcgatactattactggttcgacagtacattatgttgatagtggtatggatacgggagaaattattgaacagagaaaatgtgatattagaccggacgattcaaaagaacaattagaagagaaagtaaaaaaattggaatatgagttatatccaagtgttattgctaaaattgtaaaataaggagtatgtatgtgatgaagaaagctattttgagcgtatcaaataaaacaggtattgtagagtttgctaaagcgttaacgcaattaaattatgaattatattcaacaggtggtactaaacgtatattagatgaagcaaatgtaccagttcgttctgtttcagacttaacacattttccagaaataatggatggccgtgttaaaacattacatccggctgttcatggtggcattttagctgatcgaaataaaccgcagcatttaaatgaattatcagaacaacatatagatttaattgatatggtagtagttaatttatatccattccaacaaactgttgcaaaccctgatgtgacgatggacgaagcaattgaaaatattgatattggtggtccaacaatgttacgtgctgcagctaaaaactataaacatgtaacaacaattgtacatccggcagattatcaagaagtattgacgcgattaagaaacgattcgttagatgagtcatatagacaatcattaatgattaaagtttttgagcatactgcagaatatgatgaagcgattgtacgtttctttaaaggggataaagaaactttaagatatggagaaaatccacaacaatcagcgtattttgtgagaacttcgaatgctaagcacacgattgcaggcgctaaacaattacatgggaaacaattaagctataacaatattaaagatgcagatgctacactagctttagttaaaaagtttgatacacctgctacagttgcggttaaacacatgaatccatgtggtgttggtatcggtgacacgatagaacaagcatttcaacatgcgtatgaagcggatagtcaatcaatatttggtggaattgttgcattaaaccgagctgtaacacctgagttagcagagcaattgcatagtatctttttggaagtcattattgcaccaaaatttacagatgaagcattagatattttaaaacaaaagaagaatgtaagattattagaaattgatatgactatagacagtaacgaagaagagtttgtttcagtatctggcggatatttagttcaagataaagacaattatgtcgtgccaaaagaagaaatgaaagttgttacagaagtagcacctacagatgaacaatgggaagcaatgttattaggatggaaagttgtaccatcagtaaaaagtaatgcaattattttaagtaataataaacaaactgtaggtataggtgctggacaaatgaatcgtgtcggtgctgctaaaattgcgttagagagagctattgaaatcaatgatcatgtagcgttagtatctgatggatttttccctatgggagatacagttgaacttgcagcacaacatggtataaaggcaattatccaaccgggtggttcgattaaagatcaagattcaattgatatggctaataaacatggtattgcaatggtagtcacaggcactcgacattttaaacactaattttaaaggggcgtaacataaatgaatgtattagtaattggtgctggtggacgagaacatgcacttgcatataaacttaatcaatcgaatctagttaaacaagtgtttgtcattccaggtaatgaggcaatgacacctatagctgaagtacacactgaaatttcagaatctgatcatcaagcgatactagattttgctaaacggcaaaatgttgattgggtagttataggttcagaacagccgctaattgatggattagcagacattttacgagcgaatggtttcaaagtgtttggtccaaataagcaagcagctcaaatcgaaggctcaaaattatttgctaaaaagataatggaaaaatataatattccaactgctgattataaagaagttgagcgaaaaaaggatgctttaacatatattgaaaactgtgaattgcccgttgttgtcaagaaagatgggttagctgctgggaaaggcgttattattgcagatactattgaagcagccagaagtgctattgagattatgtatggtgatgaagaagaaggtactgttgtatttgaaacgtttttagaaggtgaagagttctcgctaatgacatttgttaatggtgatttagcagtacctttcgactgtattgcacaagatcataaacgcgcatttgatcatgatgaaggaccaaatactggtggtatgggggcttattgtccagtaccacatattagtgacgatgttttaaaacttacaaatgaaacaattgcacaacccattgcaaaggcaatgcttaatgaaggttatcaattcttcggtgtattatacattggtgctattttaactaaagatggtccaaaagtaatagaatttaatgcccgttttggtgatcctgaagctcaagtattattaagtcgcatggaaagtgatttaatgcagcatattattgatttagatgaaggaaaacgtactgaattcaaatggaaaaatgaatctattgtaggggtcatgttggcatcaaaaggatatcctgatgcatatgaaaaagggcataaagtaagtggctttgatttaaatgaaaactattttgttagtggattaaagaagcaaggtgatacctttgttacttcaggtggtagagttatacttgccatcggaaaaggtgacaatgtacaagatgcacagcgagacgcatacaaaaaagtatcacaaatacaaagtgaccatttattctatcgtcatgacattgcgaataaagcactacaacttaaataagtaaatttaaaatactaagattagctatgaacgaatctataacgatagattttttcatagcttttttagttgtagagtctaggacattgatttctgtaccaaatttgtgattatgcatatgtaatacaaaagaggcgccacaacatgtttggatgaacaaaataacatgtttgtggcacctcttttgtttagtatggaataaatggttttctttttctatacaatgaatttctaatttagtatctatacaattatggataaaatttaacctacacgaccaagacgaacatcatctatgcccgtgatgggtaaggtgattgaacaataatatgccatagtaataatggcaattaaaactataataaagattatatctttatatgagaaaggtacgttgtaatagtaagtacgaggaccatctctaaatcctttcgactccatcgcaactgataattgatgtgcctttctaatattttggcttaatagaggtataattaaatgcttaaatcgctttaaccctctataatttgccgcgtctatcatctgatagcgcatttttaaagatctgcgaagctgtattaaagaactaatcattaaaggtatcatacgaatggcagccatgaatgcataagcaacttttgatttaacctttaaatgttgcattaaactataaaatatcatgacaacctgagatgtaagtgcgattaagataccgaaaaatgaaatagcaatggttcttaatgatacatgtaaaccacgaactaaactttctgttgtaatatggataaatccgaatttcaaaattgtatggctaccattcccgtataaaatcatgaacagggaagagagtaatgcaaagccaatacttatagttataaaaattgctgtaattttaaactgagtaccattaaacatcaataagaaaactaacattaagatagtgatataaagcataaaatcgaaattatgcacaaatataataaagaaaaatagtataattccaagaaatagtttcgttataatgttgacatcatcaacaaatgattgccgaactttccattgctcatacattcgtatcaccatcacaatctagtaacgcaccatctgaaattttaagtcttcttgatggataacgttcaattatttcatcgtcatgtgtaaccatgacaatactttgtcccaaattaattcgcttttggaaaagtttgatcaactggaatgtattatggctatcaagtccaaatgtcggttcatctaaaaagataatatcagctttagaacttagtgcggtagctacgctaaggcgtcgtttttgaccaatagacaactcataaggatgttgatcttttacattttgtaaatctaaaagttttaaaagttgtatcgtttcatcatcactttgatctttagaaaggtgattaaaatgaatgttaatttcatcataaaccgaatttgttataaattgtaattctgggttttgataaactaggtacatgtgttttgctgcatgtttaatttttgttaaacgctgattttcaaaataaacatcaccttgatatttaatcaattgcataattgattcaagcaaggttgttttaccactaccatttgcccctgtaattgtaatccactcacctagaccaatttctaaatctgagaatgagagcaatgttgatttaccgcgaataatacgtccatttttaaattgtaataagtgtgagtttgttgttggaaagtcaacacgacttggtgcgaattcccatgcacgtggatgccacacaccatattcactgagtaaatgaacatacttctgtaatatgatttcaggacattcatcggcaatgatatttccgttataatccatcaaaatgacgcggtcgacatgattccagatgtgtttaactttatgttcaacgattacaaccgtttgatcttcccaaagttcaattagtttagtccataaatcttctgttgcttgaacatctaacattgctgtcggttcatctaaaaacaatgtttttgattgttgaagaatggtttcaacaattgccaatttctgtttcatcccgccacttaaatctttgatatacgtttcaggggtaacatttaaattgaccatatttaaagcattgataattaacgcatccatgtcttcacgtggtaattgtctattttctaaaacgaatgcaagttcttcgtatacttttggcatacaaaactggctatcagggtcttggaaaataacgccacttaatgggtcaacgattagttcatcatatttcataggtaattcaattaaattaggaacaataccacttaatacattcagaagtgtacttttaccgcaaccagaaggaccgagtaaaagtactttttctttgtcttgaatagtgatatttaaatgatcgaaaattttacgttgaccacttggatattttaatcgtaaatcacttacttttaacactctgaatgctcctcttataagttgtcgtaatcttctttagcagctggtctaaataattttgttacgcctgtcttatctaaagcttttactaaaaggtaagataggacgccggcgactactgcaccactaattaatctaaatacgatgaataatgttaagttccaacctgcaacttcatttaaataaccatagaaataatctatcgggaaagccgcgattgctgtacaaaaacctgctaacatagctaccataactgaacgtgattgatatttaaaaattgcaaagacaagttcacacgctaaaccttgtataaaagcgtaaacgattgtcggaatatcgaaacgacccataatgatagtttcgccggcacctgcagcaaattcagccagtaaagcaatacctggttttggaataattagatagcagacaatcgctgccatgaaccaaaccccgtttgttaattgttcgaggtgaaggcctgtagcttgcacaccattgtaaacaaaccaccataaattgtaaataactgcgaatactactgaaataagtacggttactagtatttcagatagctttaaaccttttgacatttttacatcctcctaataaaaaaacgcacaaccatccataggaaagttatgcgttcacaatatatattagtaaaacatatgtatagtaacactttcctacgctagttcaagctagatcaggttcaaagggtttgagggcaagcctcatctcagtataaaacacccctagtgtgtgcgatttatttaattaattatactgtaagacgtttgtaaacttatgtcaataggttgtcttcatgaaatttcgtttaattcgatttaaaatttataatattagcattggatttaaattgaagatgtagtaggaatgttagtaattaaagatataaaaatatgtgacatgtaataatattgagctgataaatgaagagggatacttatcaatcatacctctttaacaacagtgaagaacccgtgcataatggcttacgaattatagtttataaggaagaagagggatacatgcgccgagcacatgcataaaatcccctaacaactaaaagttgtaaggggatttaaattaatttagtgtatcttggatatcttgttttgtttgattaatatcttctgttttttcttcttttttatcttttaatttttcttcaacttctttagctttttctgctgcttttttattttgattttcattagacatgattaattcctcccaaattggataattatttatatataaatcttacccggttgtactttcgttaaacttttctaagtctatagcactatttattcatttatctaaagacaacaacattagattaatatataatgattttgaggtgaacataatgtcttttcttaggaaacacgccgaaattatttttagctatttaatcggtatcgtttcactcttcactggtctcattattttaattaacttgccattaattaaacaattaaatggtggtaaaaaagttgatacacatgttcataatgtgtgggaatttctgaatgcatttttcagtgaaattattaaagtaatgagtcgatttataggtaatttccctatagttagtgcaattgtgataattatattcggtattttagttatgttgattggtcatacattacttagaactattaagtatgactatgatatttctatctttttcttagttatcggtatcatgtactttattattactcttatattaatgactcaagtttatggattctttgcagtgattttcattattccatttacaattcatataggatatatcgtctataaagatgaattgaatcaggaaaatgtaaaaaatcatttcatgtggataattgtgagttatggtataagttacttaattacacaaattgcattgtatggcagaattgatgctaatgaaatagagtcaattgatatcttaagtgtcaatgctttctttataattatgtggttacttggtcaaatggctatttggaatttcttgttcttgcgccgagctttacctttaacaaagcaagaattaggtgaagaggagccagaattatcaagaacaagtaaagggaatgtcacgaatcaaactaaaattcacttgaaacaactccaagataagactacagaatatgcacgtaagacaagaagaagtgtcgatttagataaaattagagctaaaagagataaattcaaaaagaaagttaatgatattatcgatattcaagaagacgatattcctgattggatgagaaaaccgaaatgggttaaaccaatgtatgtcgaactattttgtggtgtcgtcatctttttattcacatttttagaatttaataatcgtaatgcattatttgtatctggtgattggaaattatcacagacacaatatgttattgaatgggttacattattaattctgttattcattattatcgcatatatcgctacaacgttaactttccacttgaaaggtaagttttattatttacaattatttatggggagcattttattctttaaattgttaacggaatttataaatataatgattcatggactattactttcagtgttcattacgccaacattactattaatgttattggcaatcatcatttcttattcgttacaattacgagagcgaccataattaaaagcattataaaagtactatctattaaacattttgatgtgtacgctataagttagatatatctctaacttacttagatacaggtcaatgaagtttatggatagtactttttttgtaactagatttgattgattcaggtgatgtgaattaagtattgaaaattgtatacaaagttttagtgcaaataaaatagttgaaaagttatccatttgtaaaatcaagaaaactagtaaatagttgaagcgacttatggaatttgcgaaacgatatatagtatttcctttgtagaaatttaacatatatcattcgaattactaatttgttaaaatcaacagtaagattagaagtagatgatattgaaatttggcaaacaatttaatctatataaaactacaacgaaacacagaaaggaagttgtcagatgaaaatagcaactctgaacaaaggcaaagaaacaaaatattttaatggatatcctttaattgaagaagaggatatctattcacaagatcatttaaaagaaggagatatttttcaaattgtgactgataaatcacaatatgtcgcaacggcttatgttggtcgccaacataaaggattaggttgggttctaacatacgataaagctcaacaaatcaacacagctttctttgtaaaattgtttaatactgcattagcagaacgtgattattattttaatatagatggaacaaatgcttttagattatttaatgctgaaggtgatggtgttgggggattaacaatcgacaattacgatggtcatttgttgattcaatggtactcaaaaggtatttataaatttaaatatgccattcttgaagcggttagaaaagtatttgattataaatctatttacgaaaaagtaagatttaaagacagcgaatatagtggtggttttgttgaaggagatgcacctgagtttccaattgttatcgaagaaaacttcacattttataatgtagaccttgaagatggtttgatgacaggtatctttttagatcaaaaagaagtgcgcaagaaattaagggatcaatatgccaaagaacgccatgttttaaacttatttagttatacaggtgctttttctgcaatagcagcaagtgaggcatcttcaacaacaagtgtagatttggctaatcgttctcgtagtttaactgaagaaaattttggattaaatgctattgatcctaaatcccaatatatttatgtcatggacacttttgatttctataaatatgctgcacgacatggacatagttatgacacgatcgtgattgatccacctagctttgcgcgtaacaaaaaacgtacattttcagtgcaaaaagattatgacaaattaattaatggcgccttaaatatcttatcatctgaaggaacattattgttatgtacaaacgcaagtgtatatccattaaagcaatttaaaaatactattaaaaagacgcttgaagagagtggcgttgattatgaattaactgaagttatgggattaccaaaagattttaaaacgcatccacattataagccatctaaatatttaaaagctgtttttgtaaatattagacattaatttgataaaaaggggtatagtaacttattgagaaaaagaagggtgataatattatgggattcaaaaacaatttaacatcaaatttaacaaataaaatcggtaattcagtctttaaaatagaaaatgttgacggaaaaggtgcaatgccaacgacgattcaagaattgagagaaagacgacaacgtgctgaagcaattgtaaagagaaagtctttaatgtcatcaacaatgagcgttgttccaattccgggtttagattttggtgttgatttaaaattaatgaaagatattatcgaagatgttaataaaatttatggtttagatcataagcaagttaatagccttggggatgatgtgaaagaaagaattatgtctgcagcagcaattcaaggtagtcaatttattggtaaaagaatttcaaatgcatttttaaaaattgtaattagagatgtagctaaacgtactgctgcaaaacaaacaaaatggtttcctgttgtaggacaagctgtgtctgcatctattagttactattttatgaataaaattggaaaagatcacattcaaaaatgcgaaaatgttattaaaaatgtcatgtaggtgctataatagttttgcaatttgcaaattttactgaaaccggttttaaacgaattgaatttaaagcatggttttggtaaagttaatgtataaaactaagttagtattgtaataatattgaagattctaactatacgaaggagaaatgtaattatggaacaaaattcatatgtaatcatcgacgagactggtattcacgctagaccagcaacaatgttagtacaaacagcttcaaaattcgattctgatattcaattagaatataacggtaagaaagtaaacttaaaatcaatcatgggtgttatgagccttggtgttggtaaagatgctgaaattacaatttatgctgacggtagtgatgaatctgacgccattcaagcaatcagtgacgtcttatcaaaagaaggattgactaaataatcatgtctaaattaattaaaggtattgccgcatctgatggtgtcgcaattgctaaagcttatttattagttgagccagacttaacattcgacaaaaatgaaaaagtcactgatgttgaaggagaagttgcaaagttcaatagcgctatcgaagcttctaaagttgagttaactaaaattagaaataatgcagaggttcaactaggtgctgataaagctgctatctttgatgcacatttattagttttagatgaccctgaattaattcaaccaatccaagataagattaaaaatgaaaacgctaatgctgctacagcattaacggatgtaacaacacaatttgttacaatttttgaatctatggataacgaatacatgaaagaacgtgcggctgatattcgcgacgtttctaaacgtgtgttatcacatattttaggtgtagaattaccgaatccgagtatgattgatgaaagcgttgttattgtagggaatgacttaacgccatctgatactgctcaattaaataaagaattcgtacaaggttttgctacaaacattggcggaagaacaagtcactctgcaattatgagtcgttctttagaaattccagcaattgttggtacaaaatcaattactcaagaagttaaacaaggcgacatgattatcgtagatggattaaatggtgatgtaatcgttaatccaactgaagatgagttaatcgcttatcaagataaacgtgagcgttattttgctgacaagaaagaattacaaaaactacgtgatgctgatactgttacagttgatggtgttcacgcagagcttgctgcaaatattggtacacctaatgatttgccaggtgttattgaaaatggtgcacaaggtatcggcttatatagaactgagtttttatatatgggtcgtgaccaaatgcctacagaagaagaacaatttgaagcttataaagaagtattagaagcaatgggcggtaaacgtgttgttgtacgtactttagatataggtggagataaagaattatcatacttaaacttgcctgaagaaatgaatccattcttaggttaccgtgcgattcgtttatgccttgcgcaacaagatattttcagaccacagctacgtgcattattacgtgcatcagtttatggtaagttaaatatcatgttcccaatggttgcaacaattaacgaatttagagaagctaaagctatattattagaagaaaaagaaaaccttaaaaatgaaggtcatgacatttcggatgatatagaattaggaatcatggtagagatacctgcaacagcagcattagctgatgtctttgctaaagaagtagatttcttcagtatcggtacaaatgatttaattcaatacacattagctgctgaccgtatgtcagagcgtgtatcatatctataccaaccatataacccttcaatcttacgtttagttaaacaagttattgaagcgtcacataaagaaggtaaatggacaggtatgtgtggtgaaatggctggagatgaaacagctattccattattgcttggtttaggtttagatgagttctctatgagtgcaacgtctattctgaaagcaagaagacaaattaatggtttaagtaaaaatgaaatgactgaacttgctaaccgtgcagtcgactgtgcaacgcaagaagaagttattgaattagttaacaactacgtaaaataattaattctttcgaaagacagaattataaataaacccgaagtattcattgtaagtaattatgaatacttcgggttcttttttatgatttatgttaatttcaatggaatgttgttgctaactaattaaacaactatgtgtcattaacaaaatgtagttctttaattaatgttagttaatttaaaaatcgatatttaatttatgatagctataaatgatgaagttgatttagatgaaaattaatcttggatatttaatactttgttgatttcatcaagatcaacatggtacattggattgccattcaacaaaataaacggagttgaaaaagcatcaaaatctatcatttcgtttcgatattgttgattgttgatatttctctcttcaaaatcaatgtgatgctcatttagataattttttacaaatgtacaaggtggacaatcattctgcgtataaacgattatttctgacatgtatcatgctccttcgtgctttattctaatgtaatatacacaattatacattgaaattcaaatttgtgaacacattgtgaactgacataaattatacacaatttcatagcgcataatgttttaaaaatacacattatagcaattataattaagttcattgtgttgtcatcaaaaaaagaaaaaggtgatgtttttaaatggatacagttgaaatcagtcggtttttgacagctatgactttagcagttcatatcatttttgcaacgattggtgttggtatgcctttaatgttcgcaattgcagaatttttaggtattcgcaaaaatgatcttcaatatatagctatggccaaaagatgggctaaagcttatacaattactgtagcagtgggagttgttacaggtacaattataggacttcaattatcattgatttggcctacatttatggaaatgggtggacacgttattgcacttccattatttatggaaacatttgcgttcttctttgaagctattttcttaagtatatatttatatacttgggatcgttttaaaaataaatggacacatttcttaattagtataccagtaattattggtggctctttctcagcattcttcattacttcagtgaattcatttatgaatacgcctgcaggttttgagttgaagaatggaaagatggtcaatgttcaacctatagaagcgatgtttaacccatcgtttatagttcgatcatttcacgtaattactacagccggtatgacgatggcatttgttattgcatcaatagcagcttttaaattattgcgtaatcgtcaacctaaagatactgtctaccataagaaagctttgaaaatgtctatgatagttggattcttttcaacattactttctatgttggcaggggatttatctgcaaaatttttgcataaattccaacctgaaaaattagcagcttatgaatggcatttcgatacatcttcccatgccaaattattattatttggtgtgttagatgaaaagactcagcaagttaaaggtgcgattgaattacctggactattgagtttcttagcagataatagtgtcaaaactaaagtacaagggttaaatgattttccaaaaagtttacatccgcctatgatcgtccattatttctttgatttaatggtaacgatgggaattttatgttttgtcatttcaggtgtttatgtcttaactttaatgtttaaaaagcttagaaagttttctactcataaatggatgctttatggaatattattaacaggcccagcttcaatgctagctatagaatttggatggttcttaacagagatgggtagacagccttggattgttcgtggttatatgcgcgtggcagaagcagcaacacaagcaggcggaataaccttcgttacaattttatttggcatattgtacatcattttaatgtatacatgtgcatacgtattaattcgtatgtttaaaaataaaccggcgtatgaagatgtaaatcgtttagccaagaagcaaggaggagaaatagaaaaatgatttatgcatttataggtataacagtgttatggttgtttttattttgctatatcattattgcttctatagattttggggcaggtttcttcgcattgcattcaaagttaactggtgatgaaaagaaaattaatcacttaatttcacgttatttaaacccagtttgggaagttacgaatgtattctttgttttcttcttcgtaggattcgtaggtttctttccagagtcaatcaaatatttaggcacggtattgttaataccaggttcaatagcactgattatgatatcgttgagaaacagtttttatgcatttgaaaattatggtcaagatacaaaattagcatggatgatcatgtatggggtaagtggattattaattccagcttcattatctactgctttaactattacagaaggtggctatattaatgttcgaaacaatgttatcgatctagattgggtgcagttattattaagcccatttgcttggtctgtagtattcttggcaattatttcagttttatatatttcatcaggatttttgacatattatgctaaaaaagcaaatgacgaaccagcatataatttaacaagacaatggcacatatttttagggccgccgatgattatcatttgtttattcgtatttctatcattacgcattcaaaattctgaacatttttattcagctgtttttgactattggtggatgtttggtataagtttcttattctttgcattagcttcattgttaacattctttaagaaaaaacatggtttggcttttgtatttgttattttacaaatgatgttcgcgttctttggctatggaattagtaaattgccataccttttatatccgtttgtaaaaattacagatgcatatgttaatccagaaatgggctggacattagtgattgtctttattttaggtttacttttattacttccatcgttaatattattattaagattatttgttttcgacaaagaatatgttgaaggaaagaaatcataagttgagacgataccccaactttcatttacttgcattactgcatttagataatttagttggggtactcatttataataattttaaatttatattttcaatgaattgatgaaaatcatttaatggagggcgagtatgggtaaagaatatgtagtcatcggtctaggtcgttttggaggtagtatcgttcgtgagttgaatgcattagacatggatgtaatggccatcgaccatgatgaaaatagagtgaatgaatatagtgatatcgctactcatgcggttgttgcagacactacagatgaagcagttatgaaaagtttaggtatccgtaactttgatcatgtcattgtggcaattggtgaaaatattcaatcaagtacgttgacgactttaattttaaaagagttaggtgtaaaaaaagtaactgctaaagcacaaaatgattatcatgcaaagattttaaataaaattggagcagatacggttgtgcaccctgagcgtgatatgggtagacgtattgcgcataatgttgcgagtgcaagtgtacttgattatcttgagttggcagacgagcattctattgtagaattgaaagcaactgaaaagatggcggggcagtctatcattgatttagatataagagcacaatatggaattaacattattgcaattaaacgaggcaaagagttcatcatttcaccaaatccaaatattaatttagaaataggtgatattttaatcatgattggacatgataatgatttaaatcgctttgaaaaaaatattgcgacgagataatcgggagtgggacagaaatgatattttctcaaaatttatttcgtcgtcccaccccaacttacattgtctgtagaaattgggaatccaatttctctttgttggggcccacaccccaactcgcattgcctgtagaatttcttttcgaaattctctatgttggggcccctgactagaattgaaaaaagcttgttacaagcgcattttcgttcagtcaactactgccaatataactttgtagagcattgaacattgatttatgtctcaagctcatcatatataaagaaaaagctactaacaatgggtggtgagtttaattaaaacttcacttcaaagttagtagctttttgattatttattgtttgattctttttgttcgtttaccttcataatgactggtaaaatcattggttttctagctgttttttcaaataaataaggttgtaatgtttcaatgatagaagatttaatctgatgccattgaatatctttattttgatttaacttactaataacatcagttttgattttgcgttgtgcatcataaattaattgacctgattccctcatatatacaaatcctcgagaaataatgtctggaccagaaagtaatttatttgtattaaaatcaatactaacaacaacgataactaaaccttcttcagataatagcttacggtctcttattacaacattaccgatatcaccgataccactaccatcaacaagtacattaccagatggaatgcgaccagctttacgtgctgaatcgtgtgttaaagctaagacatctccaatatcaaagatgaagacattatcttcttcaacgccgcattcaacaccagtctcaccatgtgcttttaacatacggtattcaccatgaataggtaagaaatatttcggcttgattaatcgaagcattaattgttgatcaccttgagaaccatgccctgaagtatggatgttagaaatcttgctatggataacatctgcaccagctttatacaaggaattaatagttctgttaatactttttgtattacctgggataggtgatgaactaaatacaacggtatcttcaggtataattttaatttgcttatgagtaccattagcaattctagataatgctgccattggttcaccttgtgaaccagtacatagtatcaataactcatgcttcggtacggtattaattttattaggttcaataaatgtttcaggtggtgctttaatataaccaagttccatacctattttaatattgttttccatcgaacgaccgaacgtaacaattttacggttatttttgatagcagcttcaactgcttgttgaactcggtaaatattagaagcgaaggtagcaaatataatacgacctttacaattacggaagatcttatctacgttttgaccaacttcacgttcgcttaaagtaaaatcaggcacaagtgaatttgttgagtctgaaagtaaacatagaacgccttcttcgcctaattgagccattttagcaatgtttgctggtttgcctacaggtgtaaaatcaaatttaaagtcaccggtatgaactacttttccttcaggtgtatctacgatgacgccataagtttcaggaatactatgtgtagttaagtagaaagaaatcgtaaagtgcttagatttaatcacactgtcctcattgatttcatttagtttagcagtacgtaataaatgatgttcttcaagtttattacggattaaacctaatgctaaaggaccaccataaataggtatattaagttgttttaataggaagggcacaccgcctatatggtcttcgtgaccatgtgttataaataggccaacaattttatcttggttttgaactagatatgtgtagtcaggtataacataatcaatccctaataagttatcatcagggaatttgatacctgcatcgataatgacaatttcgtctttatactcaactgcataagtatttttaccgatttcacctagacctccaagtgcatatacacctacttcatttggatgtaattgtttcattatttagcaatctccacattaaagtgttctgagttttctttttcgtaatctaaatgtgcgccctctaatttagtgataaattcgatattaaaattacgatctttcaagtaacgacgtacttgttcttctgtttgagcttcaacataaagtgattgtgtattttcacgcacaattacctcgtctctgttatgttgataaaaaactttaaatactgccatgttaaaaattcctcctaagaatgtttgtttaatttattgttaaccctagtaaaatcgtattggagtatatatcgataaattcattccaatcatctctataatgtaacttaataacgatttggttaataactaggttcatcatgtcgttcattttaaaaaattagtgaaataacactaaaatttcagttaaatcttattttacatgatgaatgataataaataaagcagtttatctcactagaaatctaagtatttcgaataaatgtgcagttctatttattaaaataaatgtagagattataaattaatgttaagaaagaattaaaggattttatatgaaacggtaaaatttaaatgaggggataaaaagtttggtagaaaggtgaatatatttaactgttgtttattcgaaaaagttgtaaaaggaaaagcttaggacatcatatttatcctaagctttgataattagaaaaatgtgttttaaacttctactgcatctgtatgtggttgtaatgggtgatctttgtcaatgtgatcatagaacattacaccatttaaatggtcaatttcatgttggaaaacaattgctggatatccttttagtcgtaattgtatatcattaccttcgatgtctttggctttaattgtaattctattatgacggtgaactagaccagcaacattatcatcgacactaaggcaaccttcaccagttggtaaataagcttcttgaacgctatgacttacaatttttgggttcacaagcatatagtcataagatttgccactgccatcatctggtattaaaacagcaatcatacgtttagaaatattaatttgaggtgcagccaaaccaacgcctgaacgtaaaccatatcgtttcgcgatttcctcatcttgactatttactaaaaactctctcatggcgattaatgtttctttttcttctttagttaatggtaattctaactcagctgctttttgacgcaaagttggatgaccatctctaatgatgtctttcattgttaacatatattgcaccttccttattttaatttgttttagttgaatgacagtaaaaaggttgttaagatactcatacatttttatgtgtaaatatctacaaagttaaccaactactgccaatgtttattttagatagtatatgtaaattttcagatatgctaattgcttaaaaaatgattaaagtgttggtttcaagcaatgatactttagaaatttatttatcatcttgactttaaaaattatattataaatgacgtaactgtcaacagatatacttagtaatgaagatgtgtaatgtaattgtttaaaattgatttccaagcagattttatttatcatttaatttaaatagcaagtggaggtacaagtaatgaaatttggaaaaacaatcgcagtagtattagcatctagtgtcttgcttgcaggatgtactacggataaaaaagaaattaaggcatatttaaagcaagtggataaaattaaagatgatgaagaaccaattaaaactgttggtaagaaaattgctgaattagatgagaaaaagaaaaaattaactgaagatgtcaatagtaaagatacagcagttcgcggtaaagcagtaaaggatttaattaaaaatgccgatgatcgtctaaaggaatttgaaaaagaagaagacgcaattaagaagtctgaacaagactttaagaaagcaaaaagtcacgttgataacattgataatgatgttaaacgtaaagaagtaaaacaattagatgatgtattaaaagaaaaatataagttacacagtgattacgcgaaagcatataaaaaggctgtaaactcagagaaaacattatttaaatatttaaatcaaaatgacgcgacacaacaaggtgttaacgaaaaatcaaaagcaatagaacagaactataaaaagttaaaagaagtatcagataagtatacaaaagtactaaataaggttggtaaagaaaagcaagacgttgatcaatttaaataattaatataatacagatggtaggaaacaactaatacagttcctattatctgtatctttttttattaaaacagaactttttcaaatggtttaacagtcccatttatttgtggtacaattagtaaggataaaatgaatttctatacaattatgggaaaggtatggtgaattgaatggctcctaagttacaagcccaattcgatgcagtaaaagttttaaatgatactcaatcgaaatttgaaatggttcaaattttggatgagaatggtaacgtcgtaaatgaagacttagtacctgatcttacggatgaacaattagtggaattaatggaaagaatggtatggactcgtatccttgatcaacgttctatctcattaaacagacaaggacgtttaggtttctatgcaccaactgctggtcaagaagcatcacaattagcgtcacaatacgctttagaaaaagaagattacattttaccgggatacagagatgttcctcaaattatttggcatggtttaccattaactgaagctttcttattctcaagaggtcacttcaaaggaaatcaattccctgaaggcgttaatgcattaagcccacaaattattatcggtgcacaatacattcaagctgctggtgttgcatttgcacttaaaaaacgtggtaaaaatgcagttgcaatcacttacactggtgacggtggttcttcacaaggtgatttctacgaaggtattaactttgcagcagcttataaagcacctgcaattttcgttattcaaaacaataactatgcaatttcaacaccaagaagcaagcaaactgctgctgaaacattagctcaaaaagcaattgctgtaggtattcctggtatccaagttgatggtatggatgcgttagctgtatatcaagcaactaaagaagcacgtgaccgcgcagttgcaggtgaaggtccaacattaattgaaactatgacatatcgttatggtcctcatacaatggctggtgacgatccaactcgttacagaacttcagacgaagatgctgaatgggagaaaaaagacccattagtacgtttccgtaaattccttgaaaacaaaggtttatggaatgaagacaaagaaaatgaagttattgaacgtgcaaaagctgatattaaagcagcaattaaagaggctgataacactgaaaaacaaactgttacttctctaatggaaattatgtatgaagatatgcctcaaaacttagcagaacaatatgaaatttacaaagagaaggagtcgaagtaagccatggcacaaatgacaatggttcaagcgattaatgatgcgcttaaaactgaacttaaaaatgaccaagatgttttaatttttggtgaagacgttggtgttaacggcggtgttttccgtgttactgaaggactacaaaaagaatttggtgaagatagagtattcgatacacctttagctgaatcaggtattggtggtttagcgatgggtcttgcagttgaaggattccgtccggttatggaagtacaattcttaggtttcgtattcgaagtatttgatgcgattgctggacaaattgcacgtactcgtttccgttcaggcggtactaaaactgcacctgtaacaattcgtagcccatttggtggtggcgtacacacaccagaattacacgcagataacttagaaggtatcttagctcaatctccaggtctaaaggttgttattccttcaggcccatacgatgcgaaaggtttattaatttcttctattagaagtaatgacccagtcgtatacttagagcatatgaaattgtatcgttcattccgtgaagaagtacctgaagaagaatatacaattgacattggtaaggctaatgtgaaaaaagaaggtaatgacatttcaatcatcacatacggtgcaatggttcaagaatcaatgaaagctgcagaagaacttgaaaaagatggttattctgttgaagtaattgacttacgtactgttcaaccaatcgatgttgacacaattgtagcttcagttgaaaaaactggtcgtgcagttgtagttcaagaagcacaacgtcaagctggtgttggtgcagcagttgtagctgaattaagtgaacgtgcaatcctttcattagaagcacctattggaagagttgcagcagcagatacaatttatccattcactcaagctgaaaatgtttggttaccaaacaaaaatgacatcatcgaaaaagcaaaagaaactttagaattttaatacattttaaaagttaacgaagttagcgtattttagtctcattgattaaaatgaaatgtttaatttacgaaatcttaggagggcaaaaacgtggcatttgaatttagattacccgatatcggggaaggtatccacgaaggtgaaattgtaaaatggtttgttaaagctggagatactattgaagaagacgatgttttagctgaggtacaaaacgataaatcagtagtagaaatcccatcaccagtatctggtactgtagaagaagttatggtagaagaaggtacagtagctgtagttggtgacgttattgttaaaatcgatgcacctgatgcagaagatatgcaatttaaaggtcatgatgatgattcatcatctaaagaagaacctgcgaaagaggaagcgccagcagagcaagcacctgtagctactcaaactgaagaagtagatgaaaacagaactgttaaagcaatgccttcagtacgtaaatacgcacgtgaaaaaggtgttaacattaaagcagtttctggatctggtaaaaatggtcgtattacaaaagaagatgtagatgcatacttaaatggtggtgcaccaacagcttcaaatgaatcagctgcttcagctacaagtgaagaagttgctgaaactcctgcagcacctgcagcagtaacattagaaggcgacttcccagaaacaactgaaaaaatccctgctatgcgtagagcaattgcgaaagcaatggttaactctaagcatactgcacctcatgtaacattaatggatgaaattgatgttcaagcattatgggatcaccgtaagaaatttaaagaaatcgcagctgaacaaggtactaagttaacattcttaccttatgttgttaaagcacttgtttctgcattgaaaaaatacccagcacttaacacttcattcaatgaagaagctggtgaaatcgttcataaacattactggaatatcggtattgcagcagacactgatagaggattattagtacctgttgttaaacatgctgatcgtaagtctattttccaaatttcagatgaaattaatgaattagctgttaaagcacgtgatggtaaattaacagccgatgaaatgaaaggtgctacatgcacaatcagtaatatcggttcagctggtggacaatggttcactccagttatcaatcacccagaagtagcaatcttaggaattggccgtattgctcaaaaacctatcgttaaagatggagaaattgttgcagcaccagtattagcattatcattaagctttgaccacagacaaattgatggtgcaactggccaaaatgcaatgaatcacattaaacgtttattaaataatccagaattattattaatggaggggtaaaacatggtagttggagatttcccaattgaaacagatactatagtaatcggagcaggtcctggtggatacgttgcagcaattcgtgcagctcaattaggacaaaaagtaacaatcgttgagaaaggtaatcttggtggtgtttgcttaaacgtaggatgtattccttcaaaagcattactacatgcttctcaccgttttgttgaagcacaacattctgaaaacttaggtgttattgctgaaagtgtttctttaaacttccaaaaagttcaagaattcaaatcatcagttgttaataaattaactggtggtgttgaaggcttacttaaaggtaacaaagttaacatcgttaaaggtgaagcatatttcgtagataacaatagcttacgtgttatggacgaaaagagcgcacaaacatacaactttaaaaatgcaatcattgcaacaggttcaagaccaattgaaattcctaatttcaaattcggtaaacgtgttatcgactcaacaggtgctttaaacttacaagaagtaccaggtaaattagttgtagttggtggaggatacattggatcagaattaggtacagcatttgctaactttggttcagaagtaaccatccttgaaggtgctaaagatatcttaggtggcttcgaaaaacaaatgacacaacctgttaaaaaaggtatgaaagaaaaaggtgttgaaatcgttactgaagctatggctaaatcagctgaagaaacagataacggagttaaagttacttatgaagctaaaggcgaagagaaaacaatcgaagctgattatgtattagtaactgtaggtcgtcgtccaaacacagacgaattaggcctagaagaattaggtgttaaattcgctgaccgtggattattagaagttgataaacaaagccgtacgtctatcagcaatatctatgcaattggtgatatcgttccaggtttaccacttgctcacaaagctagctatgaagctaaagttgctgctgaagcaattgatggtcaagctgctgaagttgattacattggtatgccagcagtatgctttactgaaccagaattagctacagttggttattcagaagcgcaagctaaagaagaaggtttagcaattaaagcttctaaattcccatatgcagcaaatggtcgtgcattatcattagatgatactaacggatttgttaaacttattacacttaaagaagatgatactttaatcggtgctcaagtagttggtactggtgcatcagatattatctctgaattaggtttagcaattgaagctggtatgaatgctgaagatatcgcattaacaatccatgcacatccaacattaggtgagatgactatggaagcagcagaaaaagctatcggatacccaatccatacaatgtaataactgattatctataaagattcagtcattaaaagctgtagcatatgctacggcttttttgttttaggtaaagtaatgtaaggaaattgatttgagatatcgttaacatgtgacatgcatgttatactagcgatgctaacaaaagaattgaaatggagggttcaacaatggaatatgagtatccaattgatttagactggagtaatgaagagatgatttcagtgataaatttctttaatcatgtagagaagtattatgaatccggcgtgacggcaggcgactttatgggtgcatataaaagatttaaagaaattgtgcctgctaaagcagaggaaaaacaaatttttaatactttcgaaaaaagtagtggctataatagttacaaagcagttcaagatgtaaaaactcactctgaagaacaaagagtaacagctaaaaaataattcgttcgaaattaacacaatttaataggaatttttctttaaaactattgctaataaagctatattttgatacctttatcaagtgttaaacaaaatgtttgataaaagtaaacttaatatagcttttttaggtggaaaaataaatgaacataggtaataaaattaaaaatcttagaagaattaaaaatttaacgcaagaagaacttgctgaacgtacagacttatcgaaaggctacatttcacaaatagaaagtgaacatgcctcaccaagtatggaaactttcttaaatattatagaggtgttaggaacgacgccaagtgaattttttaaagacagtgaaaatgaaaaagtattatacaagaaggaagaacaagttatttatgatgagtatgatgaaggttatatattaaattggttagtttcaaagtcaaatgaatatgatatggagccattaatattaactttaaagcctggagcatcatataaaaattttaatccatcagagtctgatacgtttatttattgtatgtcaggtcagataacacttaatttaggcaaagagatatatcaagcacaagaagaagacgttttgtattttaaagcacgagataatcatcgtttgtcaaacgaatcaaacaatgaaacacgaatacttattgtagcgacagcttcatatttataggggggatcttatttggaaccgttattatcattaaaatcagttagtaaaagctatgatgatcttaatatcttagatgacatagatattgatattgaatcaggatacttttatacattattaggtccttcaggttgtggtaaaacaacaattttaaaattaattgcagggtttgaatatcctgacagtggtgaagtgatttatcaaaacaaaccaattggtaatttaccaccaaataaacgtaaagtgaatacagtctttcaagattatgcattatttccacacttaaacgtctatgataatatcgcttttggtttgaaattaaaaaaattatcaaaaaccgaaattgatcaaaaagtaactgaggcattaaaattagtaaaactttcaggttatgaaaaaagaaatattaatgaaatgagtggcggacaaaagcaacgtgttgcaattgcacgtgctatcgtaaatgaaccagaaatattattgttagatgaatctttatccgcattagatttgaaattgcgtactgaaatgcaatatgaattacgagaattgcaatctagattaggtattacatttatatttgtaacacatgatcaagaagaagcgttagcattaagtgactttctttttgtattaaaagatgggaaaattcaacaatttggcacaccaacagatatatatgacgaaccagtgaatcgatttgtagctgattttattggagaatctaatattgttgaagggcgcatggttagagattatgtcgtgaatatttatgggcaagatttcgaatgtgtcgatatgggtattcctgaaaataaaaaagtagaagtcgttattcgaccagaagatatatcattaatcaaagctgaagaaggattatttaaagcaactgttgattctatgttatttagaggggtccactatgaaatatgttgtatagacaataaaggttatgaatgggtaatacaaacgactaaaaaagctgaagtaggcagtgaagttggtctttattttgatcctgaagccattcatattatggttcctggagaaacagaagaagaatttgataaacgtattgaaagctatgaggaagtagacaatgcgtaatactaataaatttctcttaatcccgtatttactatggatggttatatttattattgtaccagttgtattactcatttatttttcatttttagatatcaatggacattttagtttcacgaattatcaacaaatttttactacaaaatatttgaaaatgtttgcatattcaattttatatgccgcttcaataacaattattaccttgactatcagttatccagctgcctattatattactcgttcgaaatttcaaaatatcttattaatgataatgattattccaacatggataaatttattgttaaagacatatgcttttataggtttattaagtcatgatggcgtgattaatcaatttttccacttatttaatttaccatcattcaatttgttatttacaactggtgcgtttttagtagtggcaagttacatttatataccatttatgattttacctatatttaatagcatgaaagcaattcctaataatttattgcaggcctcaagtgatttaggtgccagtcctttctatacttttagaaaagtaatcatgccgttaacaaaagaaggtgttatgactgggattcaagtaacctttattccatcactttcattatttatgattacaagattaattgcaggtaataaagtcataaatataggtacggcaatagaggaacaatttttaacaattcaaaattatggtatgggatcaactatagctatattcttaattgtatttatggcattcattttaatcattacaaaatcatctaatgggagagggtgaatcatatgaaatggtatggaaagctgtatatcgggatacttttagcgattttatacatcccaatattctttttaatgttctattcattcaattcggctggtaatatgattcactttgaacattttacattagagcattatcaatcattatttcaaaatgatcatttaatgtcggtcatttttaatacgatagctgtagcacttttagcagcctcaatttctacagttattggtacatttggtgccattgctatttattatttaagaaataaaaagtttaaagtaactttactaacattgaataatgtcttgatggtatcatccgacgttgtcataggtgcatcattcttaattatgtttacaacgattggccattttactggtcttggtttaggattttggacagttctaatatctcatattgcattttgcatacctatagttgtgattatcgtcttaccacaactgtatgaaatgaataataatatgttaaatgctgcaagagatttaggagcgactgaaccacaattattaagcaacattattattcctaatattttaccttctattataggaggattctttatggctttaacttattcactagacgatttcacagtaagtttcttcgttactggtaatggctttagtgtgttatcagttgaagtttatgctatggcgagaaaaggaattagtatggaaattaatgcgatttcaacattattgtttgctgttattgtattaggaatactaggatattatttgattcaatacgtgataaataagaaaaaactaatcaagcgaggtgtaaaataatgaaacgatttttacaactcattataggtgcattagttgtgggtatgctttgtcttactttaagtcattggtttaaatctaaagaacaagtgcatacaaatcaaaaaatttacgtatacaattggggcgaatatattgatccagagttaattaagaaatttgaaaaagaaactggcattcaagtcgtttatgaaactttcgattcaaatgaagcgatggaagccaaaattcgcaatggcggtacacattatgatgttgcttttcctagtgaatatacagttcaaaaattgaaaagagatcatttattgttaccaatagatcataataaggtacctaatattaaaaatttagattcagattatatgaatatgtcatttgatagaggcaataaatattctttaccttatttctttggaactgtaggtattttatataataaagaaaagtatccaaatgaatcatttgatagttggaagtcattgtataatcctaaatttaaaaaccaaattttactagttgacggtgctagagagattataggcatgagtttgaataaacttgggtataatcttaatgaccgtaattcgcaccatttaaaagaagcagagcgagatttaaccaaactagcaccacaagtaagaggtgtcgtaggtgatgaaattaccatgatgcttcaacaaaatgaaggtaacatagcggttgtttggagtggtgttgcagcacctctagtgcaagaaggggataaatataattatgttattcctaaagaaggatcgaatttatggttcgacaatatggtaattccaaaaacggcacaaaataaagagggtgcatataaatttatgaattttttattagatgctaaaaataacaagcaaaatacagaattcgtaggctatgcaacgccaaacaaggctgctcgacaattgttgcctaaagagattaaagacgaccatcgtttttatccgactaagaaagagcaagaacgccttgaagtttataaagatttaggacctgaagttttaagtgaatacaatgaaaactttttgaatttcaaaatgtcattaaaataaaatcataaatagtagttatttactgtatatttagttataataacgggataagtactataaggagttgtaacgaatgactggagaacaatttactcaaattaaacgtccagtaagtagattaactgaaaaagttctaggttggttatgttgggtgatgttattagtgcttactgtcattacgatgtttatagcacttgtttcattcagtaataacacatcgattgctaatcttgaaaatacattaaacaataatgcatttatccagcaattattagctggaaatggctataatacaacacaatttgtaatatggttacaaaatggtatatgggctattatcgtttactttattgtttgtttgttgatttcatttttagctctcatatctatgaatataagaatcttgtcaggtttcttattcttaatatcagcaattgtaacgattcctttagttttacttatcgttactttaatcattccgatattattctttattattgcgatgatgctatttataagaaaagataaagttgaaatggttgcgccacaatattatgaagagtataacggaccgatttatgattatcgtgaacctgtgtatgagcgcccccaaccgaaagatgattattatgatgtgcctaaatatgaaaaagaattggataaatcaaatactgtatatgatcaagaacaggaaagagataaatatgatcaatttcctaaacgtgcagttgaaagtgaatataatcatgatgagcgcactgaggaagaaccatcagtattatccagacaggctaaatacaaacaaaaaagtactgaagaactaggtattgaagatgatggttattatgcagaacctgaagttgatccaaaagaattgaaagcacaacaaaagcgagaaaaagctgaaattaaagctaagaaaaaagaaaaacgtaaagcttataaccaacgaatgaaagaacgtaggaaaaatcaacctagcgcagttagtcaacgtcgaatgaattttgaagagcgacgtcaaatttacaacaatgatatttctgaagaacgcaattcaagtgaagttaaggacaaaaaagagcaagaataaatattgatgatacccagattagtaagcagaggtcttttgcttattaatctgggtttttatatgaggttaattatcgataacgtttaattaaagtgtttaggtgtcataattttaaatgacgatttctcattactatacacctaaattatcatcaatctgaattcagatgtttattataaaaattagatgaaaaatatgttaatatacaagtaatttaatgtgcgtatatctataggctcgtagtatacttattaaaatattaaacaaagaaaggattttaagatgaatagaaaacctgaattaatcatggcttggattgcaaatagtattagtattatttatttattagttatggggctatcctatttttctttaaaaagtggtaatgcatcacaacgtgaagaattagcgaagcaattatctcagaacggtggcaaggtttctttagatatgcttcagacaacaatgggtgcattagcaattattttattaatttcaacactttatggtatatttgcgacaatttgtattaaaggacgtagaaaattatcgattatactttttgttatcgcgataattgtaagtttgatggctcttaatttaattgcaattgtcttatgggttatcgtgatgattatgttgatttctaaaaaagaatcaaaagaaacaacacataaggacgatgagtatatttatcattaatatgttcatagcaaaagaaaaaccattaaaatgttaagttgttaattattagatacaaccaacattttaatggttttatttttaactttgtagttcttggaatgtttgaacgattaaatagacatttaaaatacttagaataataataagtgtccatgaaatgatattaacccatgttttattatagaaaggtcccatcaagtctttattactagtagccaattgtaatggtattaaacagaatggcagagcaatacttaaaaatacttgagagaatacaagtagttgctcaattttagctgcattacctttaaaaatgattaagcatacgataacaggaatgacagcaagagaacgtgtaattaaacgtcttaaccaatttggtatgtgtaatcttaaaaatccttccattacaatttgtcctgctaaagtaccagtaatcgttgaattttgacctgacgctaataatgcaactgcaaataatgtactcatgattgcacccattgttgcacctagtacaggttcagtttttaaggcgtgatataaatcatagaaaccacctaaatcgtcagcatttgagttgaaaaatagtgatgctcctaacactaataataagcaattgactacaaatgcgattgataactgaatgttcgaatctatcgtagcaaatttaatcgcttgcgctttttcttcattgttatgtcttgagtatgttctagattgtacaattgatgaatgtaagtacaaattatgaggcataattgtagcgccaataatacctaatgcaatatagagaatgccgttatttgtaatgatttcactatgtggtataaatccatttaacacagcattcaactgtggtgatgaaatatagacttcaaatataaagatgaataacactgtgaaaattaatgtaccaacaatagcttcaatttttctaaaaccatatttcattataaaaagtagtaaaaatacatcaagtacagttattagtgcaccgacgattaaaggtatgttaaataggagattaagagcaatagcactaccaataacctcagcaatatctgtagcgataattgctagttctgcaatgatccaaaagattatagcaataggtcttgataaataatgtcgtgtcatttgagctaagtccatacctgttgctattcctaatctcactgtcatgctttgaagtaacattgctgataaacttgaaataagaattacgaatagcaaagtatagccatattgggcgccaccttgcattgatgttatccagtttccgggatccatgtaaccaacagcgactaataacccaggtccaagaaatgataaaaatttctgtttatttgaactgcgatgatcgaatttaattgtattgtttatttcgtctaaacttaattgttcatttgttgaatgtcgtttattattcattttgactcacctctacttcttatggacaatataataacctaataaaatgtttaggtcaacctaaatttattttaaaagtatgaattattatgttgaacgttcgatttaatattaagaaaaaagagcacgaaatcatggatgtgattaagtgctctattatttaaacaaagttatttatgcagaataaaatggtaagaactgatcgaaggtttcttctaaaaatgcaataaatgctttgtcactttttaatcttttatcttgtggtgtgattgcacgcgctataaagaattcaccttttttcacattgatggctctttgtatcgcttctattaaatcatcatccgttaaatctttaataaatggtttatcaggtttcatatgatctaagcaaacacgataatcatcaggtaattgttgaatagctttaaattttctttcaaaaacttttgcacgtgttgctttatcttttgcttcatgcatgattccaaacataacaaacagttgatcttcaaacataccaatttggaaatgaggtaacattttatagcctcttttgtttgttgcaaaagcaacccatgtatctttaggaggattcacacttcttctagcatgctttgctacgtgaggataaaatgtttcaccagtttgacttgtaaagaagtcactaaaatattctcctaattcacggagttgtggtcgtatgtattcgtttaaagcttccattcgtgcgtctaagccttctacgttgaacgctttgaaatctttaggtttaaatgtatattttgtcatagagtacctcctgtatagtgtttaaaaatattgtagcatatgttttatcaattgcggcttaagacgctctcattaaaattagtattttcatttttatcataagaagttatttttataaaatgttgatgtataataaagatgttaggagatgatgttatggcactttatggatttgcccaaggacttattcaagaagcaggaattagaattaaacaattgatggagcaaaatttaacaattgaaacaaagtcaaatccgaatgaccttgttacaaatgtagataaagcaacagaagatttcatttttgatacaattttagaaacatatcccaatcatcaagtattaggtgaagaagggcatggtcatgacatcgatacttccaaaggtacggtatggattgttgacccaatagacggtacattgaattttgttcatcaacaagaaaatttcgcaatttcaattggtatttatatcgatggtaaaccttatgcaggttttgtatatgatgttatggctgatgtcttatatcatgctaaagtaggggaaggtgcatatcgtggtagccaacccttgaaaccattgaatgattctaatctaagacaaagcattattgggatcaatccgaactggttaactaaaccaattttaggagaaatctttaaagaaattgttaatgattctagaagtgcaagggcatatggtagtgcagcgcttgaaatcgtttcagttgctacaggtaatttagaagcatatatgacgccaagacttcaaccatgggattttgctggcggattggttattttatatgaagtaaatggacaagcttccaatttactaggagaaccattaacaattagtggtccaaattcaatcttagttggaaatcgtggtctccatcaagaaattagcaatgattatttagagccccaccatgatgcgttaatacaattacatgaacaacgatttaaaagaaaatcaaaataattaccaaaagcgtaatatgtagtcctaacaattaggtaacatattacgcttttataccttaaataataaaaacacgcgccaatataaaaccagttaaatgttcatcatgaacatgtgtggtcttaaatcaacgcgtgttattgtcgatataacttatagccaatcgttttctcgatattttttctttgtagtaaatccaattccaaaggttgcaacgagtaatataaatgttaaaatcatcattggtacatttgatgcaccaacagcaaaactaaataatactaagaaaacaacagctaatatagaaaatacccaaaagatatttttagattttttttgtttcatcctatccccaccttttgcttatcttttctcaattatatgatataataaaaaagttgtaattaaaagtgggattttacttaagaaagaaggaaactatttatatgactaataaaagagaagatgtccgcaatatagcaattattgctcacgttgaccatggtaaaacaactttagtagatgagttgttaaaacaatctggtatattcagagaaaatgaacatgtcgatgaacgtgcaatggactctaacgatatcgaaagagagcgtggaattacgattctatccaaaaatacggctgttgattataaaggtacacgtattaatattttggatacaccaggacatgcagactttggtggagaagtagaacgtattatgaaaatggttgatggggttgtcttagtagtagatgcgtatgaaggtacaatgcctcaaacacgttttgtacttaaaaaagcgctagaacaaaacctgaaacctgttgttgttgttaataaaattgataaaccatcagcacgtccagagggtgttgtagatgaagttttagatttatttattgaattagaagcaaacgatgaacaattagaattccctgttgtttatgcttcagcagtaaatggtacagctagcttagatcctgaaaagcaagatgataatttacaatcattatatgaaacaattattgattatgtaccagctccaattgataacagtgatgagccattacaattccaagtagcattgttggactacaatgattatgttggacgtattggtattggtcgtgtattcagaggtaaaatgcgtgtcggagataatgtatcactaattaaattagacggtacagtgaaaaacttccgtgtaactaaaatctttggttactttggattaaaacgtttagaaattgaagaagcacaagctggagatttaattgctgtttcaggtatggaagacattaatgttggtgaaactgtaacaccacatgaccatcaagaagcattgccagttctacgtattgatgagcctactcttgaaatgacatttaaagttaacaattctccatttgctggccgtgaaggtgactttgtaacagcacgtcaaattcaagaacgtttaaatcaacaattagaaacagatgtatctttgaaagtttctaacacagattctccagatacatgggtagttgctggtcgcggtgaattgcatttatcaatccttattgaaaatatgcgtcgtgaaggttatgaattacaagtttcaaaaccacaagtaattattaaagaaatagatggtgtaatgtgtgaaccatttgaacgtgtgcaatgtgaagtgccacaagaaaatgcaggtgctgttattgaatcattaggtgcacgtaaaggtgaaatggttgatatgactacaactgataatggacttacacgtttaatctttaatgtaccggctcgtggtatgattggttatacgactgaatttatgtcaatgacaagaggttacggtattattaaccatacatttgaagaatttagaccacgtattaaagcacaaattggcggtcgtcgtaatggtgcattaatttcaatggatcaaggttctgcaagtacttatgccattttgggacttgaagatagaggtgtaaacttcatggaacctggtactgaagtttatgaaggtatgattgttggtgaacataatcgtgaaaatgatttaactgttaacatcactaaaacaaaacatcaaactaacgtacgttctgcaacgaaagaccaaacacaaacaatgaatagaccgcgtattctaacattggaagaagcgttacaattcattaatgatgatgaacttgttgaggttacaccagaaagtatacgtttaagaaagaaaattttaaacaaaaatgttcgtgaaaaagaagcaaagcgtatcaaacaaatgatgcaagaaaacgaataatttaacataataaaagagaagctgagcgatgaaagttgcttagcttctcttttggcatataatatttgaaaaagtgtttaaatgctattatttcctgttactttcacattttcaaatttctaacttgtttattcagatattaatcgagcggatagtgttgcgcacgttgtttaggtgtgtctaatcgacttttacaatcatcacacataaatgttcgaataggattgtttttaagtcgtttagactcagttgtgcgctcatctataaatacttttgcatcacagataatgcattgcacttgtctcaaattaaatcacctcaatatgagttacatggttgattcgatatgaataaccatcttcttgattgtaaataaaactatctacaccattatcgctgtaaagtcgtttaccgtcttttgcaaattggaaaaataaatagggtaatagatctatcggtatatctaaatgatcatgctcatttgataatcgaatagtagttgcagagtcatgtggttcggaatgtttgaaaaatggtgtcatattaatgacaaatgaaccttctaacatggcacgttttttatattttatttctgaatttaaagtaggcggattagtttgtccttctaggatagcacgattccattcatgattatcttcaaagtcgattggttttgaaccatcaaatacacctttttctaaatcttcgatgctaacttttctatcatcgaaaatccaagtcgtactatctaatgttataggaaactttacggctcctttaatttgtatcattttcccactccctatcaatgtatatagcattattttaacacaaattgctaacgacacattttaaatctacttgctttttaatatttagtaagataaacttttagtaagacttgagaatttatatagagggggagcgtgtcatggcgaaacaagcaacaatgaaaaatgcagctttgaaacaattgactaaagatgctgatgaaatcttgcatctgattaaagttcaactagataatttaacattaccttcatgcccattatatgaagaagtactagatacacaaatgtttggacttcaaaaagaagttgattttgctgttaaattaggtttagttgaccgcgaagatggcaaacaaattatgttacgtcttgagaaagaactttcaaaattacatgaagcttttacacttgtttaaggtttaatatataagcatattaaaatggcgtgagatatcgacaattgagctgcgccgattttatatttatagtttaattactgattaaagtggctgttatgttgtcttcttgatgacatgtcagtcacttttattgggttttagcaattcacgatattaagtaaacaaatattctataaattacctcaagagacctgttaatatttgtgattatgactgtgtcatgtatataataagtaacatggatttttaaaattaaagtataaaacgaaatcatttgaagtataaattgtagaattggatgactgaatatatgaagaattttagaagtattttacggtatattggtaaaacctcaaagtttattgattatccgttattagttacatatattgtattgagtttaattggattagtgatggtatatagtgcaagtatggttccagcaactaaaggcacattgactggtggtatcgatgttccaggaacgtatttttacaaccgacaattagcatatgtcataatgagttttataattgtattttttattgcatttttaatgaatgttaaattactgagtaatattaaagtgcaaaaaggtatgattataactatcgtctcactattattactgacgttagtaataggtaaagatattaatggttctaaaagttggataaacttaggatttatgaacttacaggcatctgagttattaaaaattgcaatcatattatatatcccatttatgatcagtaaaaaaatgcctagagtattaagtaaaccaaaattaattttaagtcctattgtattagcattaggttgtacgtttttagttttcctacaaaaagacgtagggcaaacattactaatattaattattttagttgcgatcattttttattcaggaattggggtaaacaaagtcctaagatttggtataccagcagtgctaggattcttagtagtatttgtcattgcattaatggctggttggttaccaagttatttaactgccagatttagtacgctaacagatccattccaattcgaatcaggaactggataccatatttccaattcattgcttgcgataggtaacggtggcgtatttggaaaaggattaggaaatagtgcaatgaaattgggctatttaccagaaccacatacagattttatttttgcaattatttgcgaagaattaggtttaatcggaggattgctagttattactttagagttctttattgtatatcgtgccttccagtttgcaaataaaacatcatcatatttttataaacttgtgtgtgttgggattgccacatactttggaagtcaaacgtttgtaaacattggcggtatttcggcaacaattccattaactggtgtgccattgccatttatcagctttggtggatcatcaatgattagtttaagtattgctatgggtttacttctgattgtaggtaaacaaatcaaagtagaccagcaacgaaagaaacaacaacaaaaagttgatataagaagacaatttaattaaaaaaatactagccaatatttagtacgagatgacttctgtcattaagcaatgctaaacattggctatttatatactctttgtcaaattggactgatgagttcaataacggaagttaggcaaccaaacaacgcttaacttcctttttgttttgatattacgagattactcatgattatcaaattttataaacaaaacaacgtataattataactaaattttatgactaaaaattactaaatgtggtggcgaaattagaatcatgatgataagataaagttatcgctattgataataaatgttgatgttttgcaattttatttttaattttttagagttgtagaaatcgaaaatgtttcacaacaaaaacgtgaactacctgttgttgcatagtcatttttgaaattattatttctgaagcggaggttttaattgtctcaagaatgttaaattttgaaaatttgaaacataactatagcaaaacagagcgctttaagataaaattttattatctaattagttagaaaattctaatagtttgaggagtgtatcgctattgaaacaaataaaaaagttacttgttgctaaccgtggagaaattgcaattcgtatattcagagcggcggcagaattagacatcagcacagttgcaatttattcgaatgaagacaaaagttcattacatagatataaagcagatgaatcctatttagttggaagtgatttaggtcctgctgaaagttatttaaatattgagcgtatcattgatgtagcaaaacaagcgaatgtggatgcgattcatcctggctatggatttttaagtgaaaatgaacaatttgcgcgtcgttgtgcagaagaaggaattaaatttattggtcctcatttagaacatttagatatgtttggagataaagttaaagctcgtacaacggctatcaaggcagatttaccagttattcctggtacagacggtccaattaaatcatatgaattagcaaaagaatttgcagaagaagctggtttcccgctaatgattaaagccacaagtggtggcggcggtaaaggtatgagaatcgttcgtgaagaaagtgaattagaagatgctttccatagagcaaaatcagaagctgaaaaatcatttggtaatagtgaagtttacatagaaagatacattgataatccaaagcatattgaagtacaagtcataggtgacgaacatggaaatatcgtacacttatttgaacgtgattgttcagtacaacgtcgtcatcaaaaagttgtagaagttgcaccatcagttggattatcatcaacattacgtcaacgtatttgtgatgctgcaattcaattgatggaaaatattaaatatgtcaatgcaggtactgttgaatttctagtatctggtgacgaattcttctttatagaagttaaccctcgtgtacaagtagagcatacaattacagagatggtaacaggaattgatattgttaagacacaaattttagttgcagcaggtgccgatttatttggtgaagagattaatatgccgcaacaaaaagatattacaacattaggctatgccatccaatgtcgtattacaacagaagatccgttaaatgatttcatgccggatactggaacaatcattgcttatcgttcaagcgggggctttggtgtacgtcttgatgctggagatggtttccaaggtgctgagatatcaccttattatgattcattactcgtaaaattatctacacacgcgatatcatttaaacaagcagaagaaaaaatggtacgctcattacgagaaatgcgtattcgtggtgttaaaactaatattccattcttaattaatgtaatgaagaataaaaagttcacaagtggtgattacacaactaaatttattgaagaaacaccagaacttttcaacattcagccgtctctagatagaggtactaaaacattagaatatataggtaatgtaacaattaatggtttcccaaatgttgagaaacgtccgaaaccagactatgaattagcatcaattccaactgtatcttcaagtaaaatcgcttcatttagtggtacgaaacaattgcttgatgaagtaggtccaaaaggtgtagctgaatgggttaaaaagcaggatgatgtcttactaacagatacaacctttagagatgcacaccaatcattattagctacacgagttagaactaaggatatgattaatatcgcatccaaaacagcggacgtatttaaagatggtttctcactagaaatgtggggcggtgctacatttgatgtggcatataatttcttgaaggaaaacccatgggaacgacttgaacgtctacgtaaagctattccaaatgtattattccaaatgttgttacgtgcttcaaacgcagttggttataaaaactatcctgataatgttattcataaattcgtacaagaaagtgctaaagcaggcatagatgtctttagaattttcgattcattaaactgggtagatcaaatgaaagttgccaatgaagcagtacaagaagcgggcaaaatctcagaaggtactatttgttatacaggtgacattttaaatcctgagcgatcaaacatttatactttagagtattatgtcaaactagctaaagagttagaacgtgaaggtttccatattttagcgattaaagatatggcaggcttattaaaacctaaagccgcttacgaattgattggtgagttaaaatcagctgtagatttaccaattcatcttcacactcatgatacaagtggtaatggtttattaacatacaaacaagcaatagatgctggtgtcgatatcattgatactgctgttgcttcaatgagtggtttaacaagtcagccaagcgccaattcgttatattatgcattaaatggcttcccacgccaccttagaactgatattgaaggtatggagtcacttagtcattattggtcaactgtacgtacttattattcagactttgaaagtgatatcaaatcaccgaatactgaaatttatcaacatgaaatgcctggtggacagtattcgaatttaagtcaacaagctaaaagtttaggtttaggcgaaagatttgatgaagtcaaagatatgtatcgcagagtgaatttcttatttggtgatatcgtaaaagtaacaccatcgtctaaagtagttggtgatatggcactttatatggtacaaaatgatcttgatgaacaatccgtgattacagatggctataaattagatttcccagaatcagtagtgtcgttcttcaaaggtgaaataggacaacctgtaaatggttttaataaagatttacaagcggttattttaaaaggccaagaagcactaacagctcgtccaggtgaatatctagagccagttgattttgaaaaagtccgtgagttgcttgaagaagagcaacaaggtcctgttacggagcaagatattattagttatgtactatatccaaaagtatatgaacaatatattcaaactagaaatcaatacggaaacttatcgttacttgatacgcctacattcttctttggaatgcgtaatggtgaaacagtagaaatcgaaatcgataaaggtaaacgattaattattaaactagaaacgattagtgaaccagatgaaaatggtaatagaacgatttactatgcgatgaatggtcaagcgagacgtatttacattaaagatgaaaatgtgcatacaaatgcgaacgttaagccaaaagcagataagagtaatccaagtcatatcggtgctcaaatgccaggttcagtaactgaagtcaaggttagtgtaggtgaaactgtgaaagctaatcagccgttgctaattactgaagctatgaaaatggaaacaacaattcaagcaccatttgacggtgtgattaaacaagtaactgtaaataatggtgacacaatagcgacaggcgatttattaattgaaattgaaaaagcaactgactaaaatgattaaaataaaacgagattacacaacaattgacgtgtaatctcgtttttacatggcttaggtttaattttaaatattgatataaaaaaccgtaattttaatgggcgtgccattaaaattacggtttgcttttttgttattgcttgtcacttcttactgatcgtaacattagcatgataaagtatgttgtcataccaaataaataagtgataaataatgcatggaaaagtgcgattatcaggttaacatttgtcataatagataatgcacctgtgataacttgtaatataacaagtataaatgcagctgtataaccataatgaacagtacggttatttggataatttttaacagcgtgaatataagtaatcataataatcgtaaacactataaaagccatgatacgatgcgtgagttgaacccaatcttgttctgaatgtggtacaagatcgtggaatggcaatggccaaccaccatatgctaaacttgcatccgcatgtctcactagtgcaccagtataaacaccacaataaatgatgattgccattaaccatgttaaacgtcttaatggctttttgatatataattcgtcagcttcatatttttgatctatagagaaaataatcaatgttattaaaaatacagatgagaaactgattaatgatataccaaagtgcaatgctaaaacgtaatcgttttgttgccaaataacagcagcagctccgattaatgcttgcaataataagaatccaacactaatgattgataaaggtttaatttctttaatatagcctatatgtttccatgcagtgataactaaccataagaccattaataaagacaaagctgaaacggctctatgacttaactcaataatcgtatcaataggaaagaattctggaatcaacgcaccatgacatagtggccaagaagaaccacaaccatcagctgatccggttttggtaactaaggctccaccaagttgtacaaatgtcatcattaacgttgctacgacacctaaccattttaaattctttttgccaaacaatttatacaccccatcataaaaaaacgcatcactgagaattagaattaatagccggatttgagatgatactataaatagacctgattgtaggatatgaaaagatgggatccaacgcaggaaatatgatttaattttacaagtattgtatgtggacgacataaaaagaacttaatcgtaatgatttttttattgggataattatgtaatccacgtttactcaaatttgaagcttaaatattaatctcttttagatgcatgattctacttattaaaattttctaacatatacattatagcaataaattaaatgttatttgtgtcacaaaattgacattttctcttgtcgttaatttgtcacaatttaattttattaaacctagtctttttatgcaatctaagatatcataatcttatatgaacaaatttaaggagggggattatgagcaaagagcatactttgtcacaaaatattagcagagttaacttcaaagaattgcaacagataattaaaatgggacttgttcaaggtaacttaattccggcttttgcaggcgcatggctagcagttgtaatgacaaatcattccttcttatcatcaatacctcaaattttattaatgctatttggatctactttaattatgggtggcgcatgtgcgttaaataattattacgaccaagatattgatcgtattatgcctagtaaacaaaatagaccaactgtaaataatagaattacagatcaaaatttattactattaagttttggtatgatgttagttggagaaatttgtttgtttttattgaatataccatcaggcgtacttggtcttatggggattgtaggttatgtgtcttattactcaatatggtctaaaagacatacaacatggaacacagtgattgggagttttcctggagcagtaccaccactaattggatgggttgcaattgaaggacaaattagtttaacagcgattgcgctgtttttagttgtattttgttggcaaccaattcatttttatgccttagctattaaacgtaaagatgaatatgcacttgcaaatattccaatgttaccatcagttaagggctttaaacgtacacgtgtcagtatgtttatctggttgattattttattgccagtacctttattactaataaatttaggtgtcgtattcgtagtgttagctacattattaaatttaggatggattgcattaggtttaacaacatttaagaaaaattcagatcaaacaaaatgggcaacacaaatgtttatatattcactaaattatttagtgatctttttcgtgttagctgtgattgtttcattacttactttgatctagattaattaagttaggatgaaaaatatgggcgttccaattttaccaacgattagtacgacatgtattgtcattagtgcaattttaattgccattggttggagacttatttggaaaagggaaataaataaacacaaaaatgttatgttagctgcagctgtttttgctttaacttttttcttaatctatgcaagtagaacgatttttatcggtaatacagcatttggcggaccagcatcaattaagaaatattatacgattttcttatttttccacattaatttagcaacaattggtggtattctaggcctagttcaaattattactgcatttaaagataaatataatgtacaccgcaaattcgggccattcgcttcggttatatggttctgtactgcaattacaggtgtagcagtttacttattattatatgtattatatccaggtggagaaacgacatcactgattaaagcaacatttggtcattaatatgcttatacaaatgatactaatctgataaggcaatttgttttatcaggttttttgatgaagaatagtcggacagttgatggtattcatttgataccttaactgtccatttttttatacatattttaatcttaataatgaaattcaacctgaaaacataaagataggttatgatatagagtgtagggaaaatctttatgacgttaaaattatgcctgaagatgattttgttttatcgaaacgacacagttatgtcagtgttgaaaatttgctaattaatgtgttgttttttacaatagtattaatactttttaggtggttgattgatgaaaaagttaattataagagtcgtcggtgtattatttttagttggatttttaatatatcttttttattcaccgagattaaaatttgatgtattagagaacccgaataaaggtaataaagtaaatagatctgaacaggtgaataaatcaaataaccatgctgaaaatccaaagcctaaagaaggtgttggtacatgggtaggtaaagatattaaagtgcttacttctaaatttggacaagcagatcgtgtctacccttttagagatggttacaaaaattatgtgtttaaagacaaaaacagttattacattgtttcaactaaacgtgaagaaatcgtttcagtgtatgctacaggtgagaaagtcaatgttagtccgttaaaaataggacaacattctgcagaaatttttaatcatacaagtattaatccagaaccgtcctttaaagttgatggtaaaaaatatgaatttgaactttcagatgaagatttaaaaacacaaacactgattaaatatggcgacatatatgcacaagtgtattctgatcaacaatcgaaaaaggtgctaagtgtacgatttttaacaaaagaaatgttagcagatattgaaccttatcaattaaattctaattctacgtcagaagagcataataagcgtccagttgagcaaaatccaaatcaattaatttctctttatgaagtaacgaatgaaatgagaaaattaaaaggattaaaaccattgaaaatcaatagcgatttagcacatattgcatctaataacttatatgaagcgacctctaatggttctgatagtgttgaatttacagaggacgcattaagagggcaattagataaaaatcacgttacttataaaacaactgctcaaaatgttggttatgcgtttaatgatgtaccaacattaatccatagttggatgaattcagatatacatcgatctcgtctattaaattcaaaatacgatgagatggggggagatgtaatgagagattattattcactaattttcttagaaaaataacaatgaggggtatttatgattaatgaagcttcactagcgatattagatgatattgatgaactagctgatatgatagttgcatcagatatttatgcatcatttgagcaagctaaacaggcgctcgaaaacaatgacgaagcacatttactttatcaatcatttttaaaatcaaaagagaaatatgatgaagtaatgcgattcgggaaatatcatcctgattataagaaagttatgttagagacaagacaacgcaaaagagcatatgagatgcttgacgttgtgatgcattacaaagctagggaaatggcacttcaacatttaatagatgaagttgttacgaaaattgcgtacgctgtttcagaacatgtcaaaatagaaacaggtaatccattctttcaaacatcacatagtggttgtgcgacgggcggatcctgtaattgttcattataaaaaacatcgagtcagaaaaaggtggttattgaaaccactaactagcatctgactcgatgtttttatttattcgggattgtttgtttgaattgttgtgctaaatctggtcgatctgtcacaatcgtgtgtgcacctttttggtataaatcattcatcagatttatactatttacgccataatagcctggaatgatattcatatcatttaaccatttgataaaacgagatgaagtcaaatcaatgcctttaaaatgagtaggcatttggaacgtttgtgctaatggttggtagtacctaccacctaataaatgatattttaaaaatgcttctgtaacttcctgttggctagcaccaattgcgacggatccttgtgcaattttattaaaacgaacgatttgttctttataaaaacttgtcacaagaacgcggtcaaatgcttgattttctgcaattgtatcaaacataatttgtggtgcgattgagccttcataggattcaggagcatcttttaagtctacgtttatatacatatcaggatattgcttcagcaactcatcggaggttagtatagctgtgtgtgcatgaccacgatatggtgttagtccattgatatctttgaagtgataagctgcgtctaatttctttaattctgctaatgtatgggcactaacttttccagagccgttcgtcgttctatcaacagttgcgtcatgaaaaacgataagctgttgatcttttgtgagtctcacatctgtttcaaagccatcaacgcctaattgtttagcatagtcaaatgcaagttgcgtttgctctggtcttaaagccataccaccgcgatgcgcaaatatatatggtgcattgcctttgaaaaaagcagggatggtttgctttttagtaatcactttatttttattgatcattaatagactacttaaaaatccagcaccgactagtaccgcatttaaaatgtttctgtttacttttttcataaaaaattcctcctcgtttacttttatagcttaacaaattcatagttctgactacagcgaaatgtgtggttaatcatatagtgatgctcttgagaattgaattaatataatgatgtttaatataatctaaatacatttatcgagcaattacataagacataattaaggtagcttaatattttaaaattaataaagacatgatatgattaatgctgaaaataaatggagtgaggtttaaatgaatttaatcccaagaactagtattgtagtttatttaaaacatatgaaacatgaacgacaaatccgaaaatatggacatatcgttcattcaaatagagatcgtaaatttgtaattatgtatgtgaatgagcaagatgttgatcaaattgtacataaactaatgcaacttaaatacgttagacacattgatggctcaccatataaatacttaaagaaaacttacgaaaaagagaaacacgaaatatataattaatattattgaagttctggtatccatttttggagccttaacacactaattaaataattataatataacgataaatcatgaaatgcttgagggggctgtacatcgatacctaaaattggtatgtcgaatttttcagcacaatcatttatcatttgaaactttttatttgaatctggatatggatatttaatagcgtttatcatgatataaaatgcttggaaatgattgccagttgtagggttcataatgattgctacagatgactttttattttcagcttgtggtgaatgaaaatagataattttatcaatacgttgatggttatattcaatcatcgtcatgaattcgaacaaatctgttagaccttcaccaagtgtaataaatgtttgtttcattggtttatcattctcctttttctcaataaattatattaaataactaaatgaattggaagtgtgaacaacatgcgcgtcattgcaggtaaacataaaagtaaagctttagaaagtatggaaggccgtaatacgagaccaactatggataaagttaaagaaggtatctttaatagtttatatgatgtgtcaggtataggtttagatttatttgcaggaagcggggcgcttggaatagaagcactctctcgaggtatggataaggtaatctttgttgatcaaaattttaaagctgtaaaagttattaaatcaaatcttgcgaatttggatttagaggcacaatctgaagtttataaaaataatgcagatagagctttaaaagcattgtcaaaacgtgatattcaatttgatgtcattttcttagatccaccttataataaaggtctcattgataaagctttaaaactaatttcagagtttaatttattgaaagaaaatggtatcatcgtttgtgaatttagcaatcatgaagaaatagattatcaaccgtttaatatgattaaacgttaccattatgggttgacagacacattgttattagaaaagggagaatagcatggaacatacaatagcggtcattccgggtagttttgaccccattacttatggtcatttagacattattgagagaagtacagatagatttgatgaaattcatgtctgtgttcttaaaaatagtaaaaaagaaggtacgtttagtttagaagagcgtatggatttaattgaacaatctgttaaacatttacctaatgtcaaggttcatcaatttagtggtttactagtcgattattgtgaacaagtaggagctaaaacaatcatacgtggtttaagagcagtcagtgattttgaatatgaattacgcttaacttcaatgaataaaaagttgaacaatgaaattgaaacgttatatatgatgtctagtactaattattcatttataagttcaagtattgttaaagaagttgcagcttatcgagcagatatttctgaattcgttccaccttatgttgaaaaggcattgaagaagaaatttaagtaataaaaataacagtattttaggtttatcatggtttacaatcctaaaatactgttttcatttgttaacgatattgctgtatgacaggcgtgttgaaatctgtttgttgttgcccgcttattgcattgtatatgtgtgttgctttgatttcatttgtgaagtaatgtgcattgcttttgttaatattggttatatattgtctttctgggaacgctgtttttaaatgctttaaatattgtctgccacggtcgttcatcgctaatactttaactgcgtgaatgttactcgtaacatctgtaggtttaatgtttaataatacattcattaacagtctttggatatgcgtatatgtataacgctttgtttttagtaattttacaaaatgatgaaaatcagttgcttcataaatgttagatttcaaacgattttcaaaaccttcagtaacagtataaatattttttaatgaatctgtagtcatagctatgatttgatatttcaaatatggaaatatttgatttaatgttatatgaggtgttacgtacaagtgttgaatatctttaggtaccacatgatgccaatgatcatcttgactaatgattgatgttctaatagatgtaccacttgcaaactgatggtgttgaattaatgaatcatgatgttgagcattttctcgtttgatagaaattgcattgatgtttttagcatttttagcaattgctttcaggtaactaataccaagtatgttgttaggacttgctagtgcttcatgatgctctaataattcgctaatgatacgagggtagcttttaccttcttttactttttgtgaaaaggattcagattgttcaatttcattaatgctgtgtgctaattgctttaatgttttgatatcattattttcactaccaaatgcaattgtatcgacactcatataatctgcgactttaactgctagttcggcaaaatgatcgccagatgataaactggcagttgctggtagttcgataactaaatcagctgttgataatgccatttttgcacgagtaaacttattatagattgctggttcgccacgcatgacaaagttaccactcattattgcaatagtaacgtcagcatttgtaagttttttagattgattaatatgatattgatgcccattatgaaagggattatattctgtgattaagccaacgcttttcatttgcaattcgtcctttcggtattcattattaatattgtaacagaacatgatatgttaagaaaaaatcttgacaacttgttcttagaaagttaaaataaattttgtgcttgttagaggtgaagccatatgaaatggtcaattacgcaattaaggaaatatcaaggtaagccatttgaatttgatcaaacggtgagttttgacaatttaaaagaatcattagatttaattgatttatctccaattacaatccaaggtcagttaaccattaagtcaacagaagtcgttgcggatattcacattactggaacgtatacaatgccttgtgcacgtactcttgtaccagtaaaagtcccactagatgtaactactacagaagtatttgatttagaagggtacaatcagtataacgatgatcaagatgatgtagatgaacactatcacattattaaagatggtatggttaatcttcaggatattgtcgaggatatagttattattgagaaaccaatgagagcttattcagagcaaagtgaccaaatgttgacagtaggtaatggttgggaagtaatcgatgaggatcaattagatgagcttgctaaacagcaagaacaagatgattcagaatcacgacaagttgatccaaggcttcaaaaattacaacaattatatgataaagagcaataagtagtttaattaatgatataatgttgttaattaaactaacatttagtatttttcgtttataatctaaggaggatatatcatggcagtaccaaaaagaagaacttctaaaactagaaaaaacaaacgtcgtacgcatttcaaaatttcagtaccaggtatgactgaatgcccaaactgtggcgaatacaaattatcacaccgtgtatgtaaaaactgtggttcttacaatggcgaagaagtagcagctaaataattttagttactcaatataaaaagtcccgcttaaaatagattgttttaagtgggactttttatattgcgaaaaataattggcgaacgaggtaactggatacctcatccgccaattaaaatttgttaatttaataattaaatataaagacgatttattagtttttacgttttctaggtaatacgaatgcaacgatgctacttaaagctaataatgccattaatggtaatgtcatatctttatttgattcttcaccagtttgtggtaatgattttgctttattttcttgtgtatttttattgttttggctttgagtgtgtccatcatttgtgtttttaatgtttgctttttgtaatggagcactatcttttgcttcgctagaacctgctgaagtttgaacaacatcttttgttgtttttgatgaagcagttgttggttttgcaacattttgagtcgtagatactaccttagttggagttgtactacttgattctacttcacctttagttggttttgtagcaggcgttttgtctttacctgactcactagatgcgtcattttctttttcaacacttggtaattgtttattgtcatctttttggctgtcttgtttttgtgattctttttcaacaggtgatggtgttggtttgctaggcgtagctggagtagcttccttcttagctgagttatcttgttgttcttttttgttagatttatcggtattggcttttgtaaatgcttctttatcaacgattctgacatggtattgtccatcataatcaatcgtttttacgtgaactttaacgatagcatcatatagagttttaccttcaacatatgggaaaataattgttctagtattatttttagcatctttgcttatagttctaacacgttgaccttcaaccatgaaatctttccagtaatcgtcattagtagtttccatgaccatatattttttgccgttaagcatacctgttttaatagggtgtttaacaaaagtatccatcatagattcgttattctcaacactttcataaacaacatattttgtatcttgtaaatcagtcattttttcatttgttggttgtacattttggaattcagtaatagctgatttcacttgctcatctaaagctttctttgtatcctctaatttcttcttgtactcagcctttaatttttcaggaagtttatcttgaattttatttaattcataaacttgtctttctagtgttttcgcttttttatatggcgctaataatttttcagctttataatcttcttcagttttgaatttatctgcactgttataaattggttgtgcgaattccattaatgtgtaatcgtatttttcttctttgttattgaagtgtgttgaactaacaattttaacagcttttgttccgtttgatacagagaagcgaatgtaagcataatctttaacagtatcgtatgatactaatttaattggcaactttttgtcaccttcataaacttcaaattttctccaaaattgacctgattgtaatcctaattcaatttctggttttgaatcagtgaaaataactctagcaggtttaacagaacttgcataatgataaaactgttgagttccatctttctttttcatttcaaaatcaattggacgagagtttggtgcgctatgatctttgtcttttattgcagggtttttaatcgcttctctaagttcctgattcaaaataggatatgtattgttagtggcttttgctgctggtttaacttcttttgtttccttaggggctttaacttctttaacttctttagcttcttttgtttcagaagtaggggcctcaacttctttattagatactgagacagcattagctactggtttagtttctggagctttttcagatgttgttgttggacttgcaactgcttcagtttttggttgtgcttctgtatttgtaccacctgtttcttcagctgctgcttgtgcttcgccatttgacattaataataaaagtgtactaattgctacagatgcaacgcctagtgatgactttctaattgaataaaatgatttaaattctttttgctgtttgttcatgttgtagaaacaactcctaattgtatattatcaactgataatcattatcaattgattacttgtattgtacattgaaatgttagttaatttcaacgttattttataaaaaaataacctatgttatagattatgaaatatctatgacataggttaaataaaatttaaaataaaaaatatattaagttatgagtgtgacgatgatttatttagattcttttcttttgaaaagtaataaagataatgaacctaaaagggcaagtgttgcgaaggcaactgtgctaataaagttatcaactgaagttaaaccagtttttggtaattctttagctttagatgcttgtttaggcgtttcgttatgttttgtaactttgttagtttgttgtgatttattatcacttacagcttgattgttgctttcagatttcgctgttgcaacatctttaacaggtgtttgaactttattttgttcttgagcagtttgtgctgttttaactgtatgagcagtttgtgttttagtttgatcttttgttgtgtcagtacttacaactttagtagagtgattgtcttcaactttgcttgttgtagttacagtaggtttaactttttcaactttaggttgaactggtttagtttgctcagtaggtgttttaggttgagctggttttggttgaaccggtttaacattgtttggttttgctgcgtcagctaatgtaggaattgctttttcaaattccaaatgcgtagtatatctatgattgtaattaatttgtggcacgacaatatgtactttagtagttaagctcttatatccaggttcaactgcaacattgattgttctagtatccgcttttttattatcgttaacaacagttgttgctaattcttgattgtttgcattgtaaaatttgtattctttccagaatgatgcattgtttaacacggtttggaaataatatttattattttgtttaattactttaccagggtgttgcatatagtcatccatgtgtgacttctctgaagagccatctttttgcacttggaaattaattggttgtgatgttgcttgagaaacttgtgtgctttgattattagttgcgttcgtagcttctgttgccgcattgacttgttggctgtctgcgcctatgtatacaagggaacctaaaatgatagatgctgtacccattgtaatctttttcatagctgatgaacgttgttctgattgatacttactgtttaaataatgttttgtcatgttgttttcctcctaaggatacaaattatgtgttgttatatgagatgattaaccattgcaattgataatggttatcaattatactagcacatctattttcgtataacaataataaattgattataaaataaatattgacaatgataatcattattatttatgattttactaaagacttaaaagcaatcataaaaaggaggattatgttttgaaaaatattttaaaagtttttaatacaacgattttagcgttaattatcatcatcgcgacattcagtaattctgcaaatgccgcagatagcggtactttgaattatgaggtttacaaatacaataccaatgacacgtcaattgctaatgactattttaataaaccggcaaagtacattaagaaaaatggtaaattgtatgttcaaataactgtcaaccacagtcattggattactggaatgagtatcgaaggacataaagaaaatattattagtaaaaacactgccaaagatgaacgcacttctgaatttgaagtaagtaagttgaacggtaaaatagatggaaaaattgacgtttatatcgatgaaaaagtaaatggaaagccattcaaatatgaccatcattacaacattacatataaatttaatggaccaactgatgtagcaggtgctaatgcaccaggtaaagatgataaaaattctgcttcaggtagtgacaaaggatctgatggaacgactactggtcaaagtgaatctaatagttcgaataaagacaaagtagaaaatccacaaacaaatgctggtacacctgcatatatatatgcaataccagttgcatccttagcattattaatcgcaatcacattgtttgttagaaaaaaatctaaaggcaatgtggaataatgagaaatgttaaacaaattgctacaaaatctattatagctattattagcttaggtatacttacatatacaacaatgattggtagcgtgttggctgatgagataaaatatccatcagccaaatttaatcaacctgaagcaaaagataaaacagaattaactacatcaatttttgatgaaaagataaaagagaataaagcgttagagttactaatttttaatcaagaaaataaaaatgtaactgaggaacaacaactagttgacgaaaaggcgcaattgatttcagatatgactggtaaaatttacttgcaagtaaagctaaaaggtcaaatagataaagaacaacttgtttttcaaaatgacaaaaatgaagaatttccttttgttataaaagatgaaaaggatgacacaatagtaagaattttaattgaacagcatatggataaaatcaatatgcatgttaaaacgttggctgaaaagaaaaatctagataacaaagaaatggtgtattctattcattttaaagagaaaaaagtacaacatgatgatgcaaaagaagtgccttcaaaacatcaaaatcaagaaaataatcaagatcagcttaaaaaagatattgatgacaaaaaagatagtcaaaaatcagatactaaggaaagacgtactagcctttttactgaaaaaggattaaatgatattcctgtacaaaaagataaagtgcaacaagacagtaataaaaagattgaaaatgagcgacctaaagcatcaggtacattaaaagttgaaaatagccctccaacaataaaaaaggttgaaaataatcacaaagagcaaccgaaacataaagatgaaaaatcaaaaaaggaaaagaaaaaagtagttgaaaaagaaaaagcgttaccagcttttaatagagatgatgatagcaagaatagtagtcaattatctagtgatattaaagaacttgatgaaccaaatcataaaaagcaatatatgttatttgcagctggcattgtgttagcaactattttacttatttcggcacatttatacagcagaaagagaggtaaccaagtttgagaatcataaagtatttaaccattttagtgataagcgtcgttatcttaaccagctgtcaatcttccagttctcaagaatcaactaaatccggcgaattcagaatcgtaccaacaactgttgcattgacaatgacattggacaaattggatttaccaattgtcggcaaacccacgtcatataagacattgcctaatcgttataaagatgtaccggaaattggtcaaccaatggagccgaatgttgaagctgttaaaaagttaaaaccaacacatgttttgagtgtgtcaacgattaaagatgaaatgcaaccattttacaaacaattaaatatgaaaggctacttttatgattttgatagtttaaaagggatgcaaaagtcgattacacaattaggtgatcaatttaatcgtaaagcacaagcaaaagaattaaatgaccatttaaattctgtaaagcaaaaaattgaaaataaagcagctaaacaaaagaaacatcccaaagtattaatattaatgggtgtaccgggtagctatttagtagcaactgataaatcatatattggtgatttagttaaaatagcaggtggagaaaatgttattaaagtgaaagatcgtcaatatatttcgtctaatactgaaaatttgttgaatatcaatccagatattattttacgattaccacacggaatgcctgaagaagttaagaaaatgtttcaaaaagaatttaaacaaaatgatatttggaaacattttaaagctgtgaaaaataatcatgtttatgacttagaggaagtgccattcggtattacagcaaatgttgatgctgataaggcaatgactcaattatatgatttattttataaggataaaaaatagtgagttgatatgatgataaaaaataaaaagaaactactatttttatgtttgttagtcattttaatcgcaactgcttatatttcgtttgtaaccggtacaattaaattgtcatttaatgacctatttacaaaatttacaactggtagcaatgaagcagtggattcaatcattgatttgcgattgccacgtatattaattgcattgatggttggcgcaatgttagcagtttctggagcattattacaagcagcactacaaaatcctttggcagaggcgaatatcattggcgtttcctcaggtgcacttataatgagagcactttgtatgttgtttattccacaattgtacttttacttaccattattaagttttattggaggtttaataccatttttaataattatattgttgcattctaaatttagattcaatgctgtaagtatgatattagtaggtgttgcgttattcgtattattaaatggtgttttagaaattttaactcaaaaccctttaatgaaaattcctcaaggcttaacaatgaaaatatggagcgacgtatacatattagcagtatcagcattattgggattaatattaacattactattgtcccctaaattgaatttactaaatttagacgacatacaagcgcgaagtatcggttttaatattgatcgttacagatggttaacaggtttattagcagtatttttagcaagtgcaactgttgcgattgttggacaactagcctttttaggtattattgtgccacatgtggttagaaagctagttgggggcaattacagagtacttattccgttttctacagttattggtgcatggctattgttagtggctgatttattaggacgagtgatacagcctcctttagaaattccagccaatgctattttaatgattgtcggtggtccaatgctaatttacttaatttgtcaaagtcaacgaaatcgaatctaaaacggtacaacaactggtttagtgatgactgaagaaacgtcgttaataaaagaggatttttatgagaatgaagcgatttttaactattgtacaaattttattggttgtaattattatcatttttggttacaaaattgttcaaacatatattgaagacaagcaagaacgcgcaaattatgagaaattacaacaaaaatttcaaatgctgatgagcaaacatcaagaacatgtgagaccacaatttgaatcacttgaaaaaataaataaagacattgttggatggataaaattatcaggaacatcattaaattatccagtactacaaggtaagacaaatcacgattatttaaatttagattttgagcgagaacatcgacgtaaaggtagtatttttatggattttagaaatgaattgaagaatttaaatcataatactattttatacgggcaccatgtcggtgataatacgatgtttgatgtgttagaagattatttaaagcaatcgttttatgaaaaacacaagataattgaatttgacaataaatatggtaaatatcaattgcaagtatttagtgcatataaaactactactaaagataattacatacgtacagattttgaaaatgatcaagattatcaacaatttttagatgagacaaaacgtaaatctgtaattaattcagatgttaatgtaacggtaaaagatagaataatgactttatcaacgtgcgaagatgcatatagtgaaacgacgaaaagaattgttgttgtcgcaaaaataattaaggtaagttaaacagaaaagaggataattatgaaatttatggcagaaaataggctgacgttaacaaaaggaacagcaaaagatattatagaacgattttacacgagacatgggattgaaacattagaaggctttgatggcatgtttgttacacaaactttagaacaagaagattttgatgaagtgaaaattttaacagtttggaaatcaaagcaagcttttacggattggttaaaatctgatgtctttaaagcagcgcataaacatgttagaagtaaaaatgaagatgaaagtagcccgattataaataacaaagtaattacatatgatataggctatagttacatgaaataattgaatttaaagaggttgcagtacttgttatgacaattggtattgttagcttttgtaacgaccatacatgataccgatgatggtcgtttttttaatgaacacaaacatgctaacaacaaattgctaaaacatagtttgatttgaatgtgctttgaaaataatcatcaattatatcattttgatttattttgaagaagaaaagaattaataatgatattttggggcgtatgatttatagtagtagtatcgataaaagaaatttatacaatttgaaatattatgagtgataaaagcgattaattaatattaactatacaatcaaatgttttcatcttattaatgattaatatttttatttttaaaaataaagcgaggagctatcaatggaacaaattacttctgcacaaaataatagaattaaacaagcgaacaagctaaaaaagaaacgtgagagggataaaactggattagctttaattgaaggtgtgcatttaattgaagaagcttatcaaagtggaattgtaattacacaattatttgcaattgaaccggcaagattagatcagcaaattatcgcatacgcgcaagaagtttttgaaataaacatgaaagttgctgaatctttatcaggtacagtgacaccacaagggtttttcgcaatcattgagaagccgcattatgatatttctaaagcacaacaagtattgctcatcgatcgtgttcaagatcctggaaatttaggcacattaattagaactgcggatgctgctggaatggatgctgtaataatggagaagggtacgacagatccttatcaagataaagtgttgcgagcgagtcaaggtagtgttttccatttgccagttatgacacaagatctcgatacgtttattactcaatttaatggtcctgtttatggtacagcacttgaaaacgcagtggcatacaaagaagttacttcaagtgattcttttgcattactattaggtaatgagggagaaggtgttaatcctgaattattagcacatactacacaaaatttaatcatacctatttatggtaaagctgaaagtttaaatgtagcgattgcaggtagtattttactttatcatttgaaaggttgaccgtgttgaaagttttccgatataattataattaattgtttaacagaacatttctacgtgaatgcatacacaattgaatataaaccaataaaaaggcatggacatttatataaataattgttttagggagaataatcgtgactgcaagttattccaattatttaaagtcttttcacctttttggttacttaaagagatttaagtcggaaagacaatccgttatcaatattaaacaagtgtatgcttaggcataaatttgggtggtaccacggaaatgactttcgtcccttattttttaagaggatgaaagtctttttttagttaaacaacaaatatgataaatagaaaatgaatagttcgaatagggaggtcagtgacatatgtctgaacaacaaacaatgtcagagttaaaacaacaagcgcttgtagatattaatgaagcaaatgatgaacgtgcactgcaagaagttaaagtgaaatacttaggtaaaaaagggtcagttagcggactaatgaaattgatgaaggatttgccgaatgaagataaacctgcgtttggtcaaaaagtgaatgaattgcgtcaaacaattcaaaatgaattagatgaaagacaacagatgttagttaaagaaaaattaaataagcaattggctgaagaaacaattgatgtatcattaccaggtcgtcatattgaaatcggttcaaagcatccattaacacgtacaatagaagaaattgaagacttattcttaggtttaggttatgaaattgtgaatggatatgaagttgaacaagatcattataacttcgaaatgctgaatttacctaaatcacaccctgcacgtgatatgcaagatagtttctatattacggatgaaattttattacgtacgcatacatcaccagtgcaggcacgtacgatggaatcacgtcatggtcaaggtccagttaaaattatttgccctggtaaagtgtatcgtcgtgactctgatgatgcgacacatagtcatcaatttacacaaatcgaaggattagttgttgataaaaacgttaaaatgagtgatttgaaaggtactttagaattgttagctaagaaattatttggtgctgatcgtgaaattcgtttacgtccaagttacttcccattcactgaaccttctgtagaagttgatgtgtcatgttttaaatgtaaaggaaaaggttgtaatgtgtgtaaacacacaggatggattgaaattttaggtgctggaatggtacatcctaatgtattagaaatggctggttttgattcttcagagtactctggatttgcatttggtatgggaccagaccgtattgcaatgttgaaatatggtatagaagatattcgtcatttctatactaatgatgtgagatttttagatcaatttaaagcggtagaagatagaggtgacatgtaatgttgatatcaaatgaatggttgaaagaatatgtaacaatcgatgattctgtaagtaatttggcagaacgtattacgcgcacaggtattgaagtggatgatttaattgactacacaaaagatatcaaaaatttagttgtcggcttcgttaagtcaaaagagaaacatcctgatgctgataaattaaatgtttgccaagttgatatcggagaagacgaacctgtacaaatcgtttgtggtgcaccgaacgttgatgcaggacaatatgtcattgttgctaaagtaggtggcagattgcctggtggtattaaaattaagcgtgccaaattacgcggtgaacgttcagaaggtatgatttgttcgttacaagaaattggtatttcaagtaactatataccgaaaagttttgaatcaggcatttatgtatttagtgaagcccaagttccaggaacagatgccttacaagctttatatttagatgatcaagtaatggaatttgatttaacgccgaatcgtgcagatgctttaagtatgataggtactgcttatgaagttgcagcattatataatacaaaaatgactaagccagagacaacatcaaatgagcttgatttatctgcaaatgatgaactgactgtgacaattgaaaatgaagataaagtaccatattatagtgcacgtgttgttcacgacgtgacaattgaaccctcgccaatttggatgcaagcacgcttaataaaagcgggtatacgtcctattaataatgttgttgacatttcaaattatgtgttattagaatacggtcaaccattgcacatgtttgatcaagatgcgattggttcacaacaaattgttgttcgtcaagctaatgaaggcgaaaaaatgacaacattagatgatacagaacgtgaattattaacgagcgatattgtcattactaatggacaaactccaattgcattagctggtgttatgggtggcgatttttcagaagttaaagaacaaacatcaaatatagtgattgaaggtgctatttttgatccagtttcaattcgtcatacatcaagacgtttaaatttacgcagtgaatcatctagtcgttttgaaaaaggaatagctactgaatttgtagatgaagcagtcgaccgtgcatgttatttattacaaacttatgcaaacggaaaagtgctaaaagatagagtgtcttcaggagaacttggtgcatttattacaccaatcgacatcactgctgataaaattaatcgcactattggatttgatttgtcacaaaatgatattgttactatttttaatcaactagggtttgatacagaaataaatgatgatgttattacagtgctagtaccatcacgtcgtaaagatattacaattaaagaagatttaattgaagaagttgcacgtatatatggatacgacgatattccatcaacgttacctgtcttcgataaagttactagtggtcagctaactgatcgccaatataaaactagaatggttaaagaagtgttagaaggtgctggattagaccaagctattacgtattcgttagtttctaaagaagatgctactgcattttcgatgcaacagcgtcaaacaattgatttattgatgccaatgagtgaagcgcatgcgtcattacgtcaaagtttattaccacatttaatcgaagcggcatcatataatgtggcacgcaaaaataaagatgtaaaattatttgaaatcggcaatgtcttctttgctaatggagaaggtgaactaccagatcaagttgaatatttaagtggtattttaactggagattatgtagtcaatcaatggcaaggtaagaaagaaacggttgatttctatttagcaaaaggtgtcgtggatcgagtatctgaaaagttaaatcttgaatttagttatcgccgtgctgatattgatggattacatccaggtcgtactgctgaaatcttattagagaataaagttgttggttttattggtgaattacatccaatattagcagctgataatgatttaaaacgtacgtatgtttttgagttgaattttgatgcattaatggctgtgtcggtaggttacattaattaccagccaattccgagattcccaggcatgtctcgtgacattgcattagaagtagatcaaaatattccagcagctgatttattatcaacgattcatgcacatggtggcaatatattaaaagatacacttgtctttgatgtatatcagggcgaacatttagaaaaaggtaaaaaatcaattgcaatacgtttaaattatttagacacagaagaaacattgacagatgagcgcgtttcaaaagtacaagcggaaattgaagcagcattaattgaacaaggtgctgttattagataatgatttaaaccccatgtataaggatatctgaagtagattgatatccctaacatggggttttatttttgggttcaccaatttggttccaatgcatttaaaaagtcaaagaggaacagcggaatacagatgatgcttcgcacaactgcataaaagcctctaatgattaaaaatcaaagaggctttaaaattttttgggctttttcacgatttttaaaatgcttttttgaaatggtatctaaacgtgaaagaccgtatttttttataattttggcggcgattacatcgactttagcaccggcacctttaggaatcgtcatattaatattttttgatatttgatccatatatgtaacaaatgcgtatcgagaaattatgcttgccactgcaatggctaatgacttcgattctccttttgtttcaaattttgttttctttggaagtggtatatctgataatgcgtaatggctatacacttcgcgttttgcgaactgatcaatgacgatatagtctaattgagacgaatcaattttttcaagtacatttttgatggcttcattatgaagggcagctttcatttttacttgagtccagccttttgcttgctgaatattatatttttcattgtgtagtgttaataatgaatgtggtatgaaagtaaccaattgctcagcaagttctacaattttggtatcggttaatttttttgaatcatctacacccaaagtttttaaaatagggacatgctctttggtaacgaaagcggcacacacagtcaacggaccaaagtaatcgccacttccagcctcatcactaccaatacagttaaattgatcatacattaaagtttgttcaagaaaagaattagccatatttttctttttagttttattagtattcaattgagaatgctgcggtagaagttcttcagacacagcttctgcatgattaccttgaaacatgactttacctgattggtaaatatttacagttgtattttgatactttgcacgtgctttcataccttgaggtaaattctcagtatcaaaagaaatgcgtgacattaatgtcgttatgtctttatccgacaatttaaaaacgatattcgccatttgtgtaaatcctttcataaaatttcattgtctttagcaaaaataatcatatcataaatgataataacgtcagaaacatttatgtatgttgtaaagaattaattgcggatacttacaaaatacatagtggtcatgtataatgtttatgaaaatgttatagtgacacaatttaaacatgataaagtattgaatagaaaattctttacattatttcattataaaaagaacattaagtcatctatagagattgtgttgttgttttatcataattgcaatataacaatattagtatcaaattcagacaaactatccagtcatattttataacgtgaatttagattttaaaaaaaggatcaggagaaattataaatgacacagtttaaaaacaaggtaaatgtatcaattaatgatcagctttttacaattgttggggaagataacccagagcacatacgatatgtagcacatttagttgatgataaaataaaagaattagggtataaagcagcaggtttagatacttcaagaaaagcaatactaactgctgtgaatattatgcatgaaaaagtactactagaagaagaaaatcgacgtttgaaacaacaaattcacaaattgcagcagcgtgagcaataaatggtcattgattttatcataatcattttctttgtgtattttgtcatcgttggattcagacgaggtttttggttatctatgatacatttgagtgcaacgattgtatcattgtggattgccagtcaattttacaaatctattgtagaaagattaattgtatttattccatatcctaaaacaacagcatttaatacaacttttgcgtttcattttaatcatctacaaaatcgatttgaagcgattgtagcttttttaatgattacattgttttgtaagttcattttatatctaattatcgtaacttttgataaaataatagcgtatcaaaacattcatattttcagtcgtgcaatgggaatgatagttggtgtgtttatgacgataattgtcttacactttacgttatatctattggcattatatcctaacgaagcattacaacatcagcttaaaatatctattgtgagtcattcattgatttttcacatcccatatttatcggctttcaccattaatttataaattatcataagaggtcaggacaaaggtatatattaatgatacgtcctggtcttctttttatggagtgttattatgacaaaaaaagatgttatcaaactattagaacaaattgctacttatatggaattaaaaggggaaaatacttttaaaatatcagcgtatcgaaaagcagctcaaagtcttgaattagatgaacgaccattagatgaaatatctgatgtaacggagttaaaaggcattggtaaaggtgttgcagaagtaatcaatgattaccgtgagaccggtgaatctcagtatttacagcaattacaggaagaagttccggaaggtcttattccacttttgaaaattcaaggacttggaagcaagaaaattgctaagctatataaagagttgaatattgttgataaagcgtcacttcaagttgcttgtgaaaatggaaaagttagtgaattaagcggatttgctaagaaaacggaacaaaacatattagaagctgtgaaacaacttggtgctaagaaagatagatatccaattgatcaaatgagaagacttaatcaagaaatcattgattatatagatacattaaattatatcgatcaatattcatctgcaggaagcttccgtcgttttaaagaaatgagcaaagatttagatttcataataagtaccgataacccaaaagcagtgcagcagcaattattaaatattcccaataaagtaaaagaagttgcagtggggaacacaaaagtttcattagaattagcgtatgatgatgaaacgattggtgtcgattttcgattaattgaaccaagtgctttttatcatacattgcagcattttactgggtcaaaagaacataatataagaattcgacaacttgctaaagcacgtgatgaaaaagtaagtgaatatggaattgaacaagctgatggtacattaattcaatatgatagtgaagccaagatatatgaacattttaatgtgaattttataccacctgctatgcgagaagatggtagcgaatttgataaagatctaagtaatatcattacaatagatgatattaatggtgatattcatatgcatacaacgtatagtgatggtgcgttttctattcgagacatggtagaagcaaatatcgcaaaaggttataaattcatggtaattactgatcattcacaaagtttacgtgttgctaatggcttacaagtagaaagacttttaagacaaaacgaagaaattaaggctttagataaagaatatagtgaaattgatatttattcaggtacagaaatggatatattacctgatggctcgctggattatgatgatgaaattttagcacaacttgattatgtaattggagctattcatcaaagctttaaccaatcagaagaacaaattatggaacgattagctaatgcatgtcgcaatccatacgtgcgacatatagcgcatccaacagggcgtattataggtagaagagatggttataaaccgaatattgaacaattaatggcattagctgaagaaacgaatacagtattagaaattaatgccaatccacatcgactggatctgagcgctgatatcgttcgtaaatatccaaatgtgaaattaactattaacactgatgcgcatcatacaaatcatttagattttatgaattatggcgtagcaactgcgcaaaaaggatttgtaacaaaagatagagtgattaacgcattatcgcgtgaagcttttaaagactttattgaaaataatacaaaacttaagaaatagagggattttatgagacaaaaaacattagacgtcttagaatttgaaaaaataaaatcactcgttgccaatgaaactattagtgacttaggcttggaaaaggtcaatcaaatgatgccagctactaattttgaaacggttgtttttcaaatggaagaaacggatgagattgctcaaatctataataagcatcgtttaccaagcttgagtggcttatctaaagtatcagcattcattcatcgcgctgatattggcggcgttttaaatgtatcagagcttaacttgataaaaagattaattcaagtacaaaatcaattcaagacattttataatcaattggttgaagaagatgaaggtgttaaatacccaatattagatgacaagatgaatcaattacctgtgttaactgatctttttcaacaaataaatgaaacatgcgatacgtatgatttatatgataatgcgagttatgaattgcaagggattagaagtaaaatttctagcacgaatcaacgtattagacaaaatttggaccgtattgttaaaagccaagcaaatcagaaaaaattatcagatgctattgtaacagttaggaatgaaagaaacgttatacctgtcaaagctgaatatcgacaagattttaatgggattgtacatgatcaatctgcttcaggacaaacattgtatattgagccatcatcagttgttgaaatgaataatcaaattagtcgattacgtcatgacgaagcaattgaaaaagaacgcattttaacgcaactaactggttatgtggctgcggacaaagatgcactacttgtggcagaacaagtcatgggtcagttagattttttaatcgcaaaagcgagatatagtagaagtattaaaggaacaaagccgatatttaaagaggaccgtactgtatatttacctaaagcataccatccattattaaatcgtgagactgttgtagctaataccatcgaatttatggaagatattgaaacggtaattattacaggaccgaatacaggtggtaaaactgtaacattaaaaacattaggtttaattattgttatggctcaatcaggattgttgattcccacacttgatggtagtcagttaagtgtatttaaaaatgtatattgcgatatcggagatgaacaatcaatagaacaatcattatcaactttttcatctcatatgacgaatatagttgaaattttaaagcatgcagacaaacatagtttagttttatttgatgaattaggtgcaggtacagatccgagtgaaggtgctgcattagcaatgagcattttagatcatgttagaaaaattggttctctagtaatggcaacgacgcactatcctgaacttaaagcatatagttataatcgagaaggcgttatgaatgcgagtgtagaatttgatgtagatactttgagtccaacgtataagttattaatgggtgtgccgggtcgttcaaatgcttttgacatttctaaaaagttaggtcttagtttgaatattattaataaggctaagacgatgattggtactgatgaaaaagaaataaatgaaatgattgaatcattagagcgtaattacaaacgtgtagagacacagaggttagaactggaccgtcttgtaaaagaagcggagcaagtgcatgatgatttatctaagcagtatcaacaattccaaaattatgaaaagtctctaatagaggaagcgaaagaaaaagcaaatcagaagattaaggctgcaacaaaagaagctgacgatattattaaagacttaagacaattgcgtgaacaaaaaggtgcagatgttaaagaacatgaattgattgataagaagaaacgattagatgatcattatgaagcgaaatctataaagcaaaatgtacaaaagcaaaaatacgataaaattgttgctggtgatgaagtaaaagtattatcttacggtcaaaagggtgaagttttagaaattgtcaatgatgaagaagcaattgttcaaatgggaattattaaaatgaagttacctattgaagatttagagaaaaaacaaaaagaaaaagttaagccaacgaaaatggttacacgtcaaaatcgtcaaacaattaaaactgaacttgacttacgaggctatcgttatgaggatgctttaattgaactagatcaatatttagatcaagccgttttaagtaattacgaacaagtttatatcattcatggtaaaggtacaggtgcacttcaaaaaggtgtacaacaacatttgaaaaagcataaaagtgttagtgactttagaggtggtatgccaagcgaaggtggatttggcgttaccgttgcaacactaaaataaattataatttgataaattaaatagctgcagttaaaataatgtaaagcaacaagaatacatttcaaacatgttatttgaaataagcataaaaattgagcaaatagaaatacatgaagcatgttatctgatataatttgaacatcataataataattaaggaggattggcatttatggcaatcgtaaaagtaacagatgcagattttgattcaaaagtagaatctggtgtacaactagtagatttttgggcaacatggtgtggaccatgtaaaatgatcgctccggtattagaagaattagcagctgactatgaaggtaaagctgacattttaaaattagatgttgatgaaaatccatcaactgcagctaaatatgaagtgatgagtattccaacattaatcgtctttaaagacggtcaaccagttgataaagttgttggtttccaaccaaaagaaaacttagctgaagttttagataaacatttataagttacaaccaatgacgactggggcatttctttaatgaattgctccagtttttgtttgtgtttttaatataaaaagttgaatgataagtcatcatattgtttacgacttgagaatggtgggattaataaatctatgaacgttaaatgataatctagcatgctgatagatttgtagcagttggtttgataaaaccatgttcaatattacatgatgtgcatgaaaagtcatactcgaagatgttgattattaactagaattagtggtgataaatttgaagcacttttgtagcatcattcattttaaaattagaaggggggatatttttggaagactataagcaacgaattaaaaataaattaaatgtcgtacctatggaaccaggatgctatttaatgaaagatcgtaatgatcaagtgatatatgttggcaaagctaaaaagctaagaaatcgattgcgatcatattttacgggtgctcatgatgctaaaacaacgagactggttggtgaaatacgtcgctttgagtttattgtcacgtcaagtgaaacagaatcacttttactggaattgaatctgattaaacaatatcaaccaagatataatatattattaaaggatgataaaagttatccatttattaaaattacgaaggagaaatatcctagactactagtgacgagaactgtaaaacaaggtactggcaaatatttcggaccgtatccgaatgcatattctgctcaagaaactaaaaagttattagacagaatatatccatatcgcaaatgtgataagatgccagataaattatgtctttattaccatattggacaatgtttaggaccatgtgtatatgacgttgatttgagtaaatacgcacaaatgacgaaggaaattactgattttctgaatggggaagacaaaacaattttaaaaagtttagaagagcgaatgttaactgcaagtgaatcacttgattttgaacgggctaaagaatatagagatttaattcaacatattcaaaatctgacaaacaaacaaaaaattatgtcatcagataaaacgattcgtgatgtctttggttatagtgttgataaaggatggatgtgtatccaagttttctttatacgacaaggtaatatgataaagcgagatacaacgatgattccattacagcaaacagaagaagaagaattttatacatttattggacaattttatagcttaaaccaacatattttacctaaggaagttcatgtaccacgtaatttggataaagaaatgattcaacctgttgtggacactaaaatcgttcaacccgcgcgaggtcccaaaaaagatatggttgacctagctgcacataacgctaaagtatccttaaataataaatttgaattaatatcacgtgatgagtccagaacgattaaagctattgaagaacttggaacacaaatgggaattcaaacaccaattagaattgaagcattcgataattctaatattcaaggtgtggatccagtgtcagcaatggttacatttgtcgacggtaaaccagataagaaaaattatagaaagtataaaatcaaaacggttaaaggtccagatgattacaaatcaatgagagaagtagtaagacgacgatattctcgcgttttaaacgaaggattaccattacctgatttaataatagtagatggtggtaaaggacatatgaacggggttattgatgtgctacaaaacgaattaggtcttgatatccctgttgcaggtttgcagaaaaatgataaacaccaaacatctgaattattatatggcgctagtgcagaaattgtaccactgaagaaaaatagccaggcattttatttgttgcaccgtatccaagatgaggttcacagattcgcaatcacatttcatagacaaacacgtcaaaagacaggcttgaaatcaatacttgatgatatagatggtatcggtaacaaacgtaaaacattattattgcgttcattcggttcaatcaagaaaatgaaggaagctacacttgaagattttaaaaatataggtattcctgaaaacgtcgcaaagaacctacatgaacaattgcataaataaattactgggcgtgagaatcattctcatgccccaaaatatatgaaataatgttacaatatggttaacaaagttatttttttgaatgtacgtggaagcgttttctaaatgagaaagtttatcatcacaagcaattttaaatatcgaatccaaatgttacattgttcgacatgcagtttggtgatcgtgcagtgtgtatttgtctttaaaatgtttcgcttaatgataatgacaacgctagaaacgatatcactttagggggttaagcgtacgtttaatataaatagctcaataaattaaatattcgttcacaggggggactccttttggctcaatcaaaaaatgaattttatctaagacgtattcactcgttattaggtattatcccaataggtgcatttttggtcgttcatttattagtgaatcaccaagcaacacaaggtgctgaagcgtttaataaggcatctaactttatggaatcattaccatttctaattattgtagaatttttatttatatacattccgttgttatatcacggtttgtttggtatacacattgcatttacagcaaaagaaaatgttggacattactcgatttttagaaactggatgttcttcttccaaagagtgagtggtatcttaacatttatctttattggtatccatttatggcaaacacgtttacaaaaagcattttacggcaaagaagtgaattacgatttaatgcacgaaacattgcaacatcctggatgggcaatattttatattatttgtattattgctgttgtgttccactttgcaaatggcttatggtcattcttagttacttggggtggacttcaatctccaaaatcacaacgagtatttacatgggtttcattaatcgtatttttagttatttcgtatattggtgttactgcaattattgcctttatgtaatacatcgcatttaacaaatatagattgaaaatttaggggagtgaaatttttatggcagagaaacatcttattgttgtcggaggtggcctagcgggcttaatgtcaacaattaaagcggcagaaaaaggtgcacatgtagatttgttctcagttgtaccagtaaagcgttcgcactctgtttgtgcccaaggtggcattaatggtgcggtcaatactaaaggggaaggcgattctccttggattcactttgatgatacagtgtatggtggcgatttccttgcaaaccaaccacctgttaaagcgatgacagaggcagcacctaaaattattcatttattagaccgtatgggcgtaatgttcaatagaacaaatgaaggtctattagattttagacgtttcggtggtacattacatcacagaacagcatatgcaggggcaacaactggacaacaattattatatgcattggatgaacaagttcgtgcatatgaagtagatggattagttacgaagtatgaaggatgggaattccttggcatagttaaaggtgacgatgatagtgcaagaggtatcgttgcacaaaatatgacaactgctgagattgaaacatttggttcagatgcagttattatggcaacgggtggccctggtattattttcggtaaaacaacaaactcaatgattaatacaggatcagcggcttccattgtttaccaacaaggcgctatttatgctaatggtgagttcattcaaattcatcctactgcaatccctggtgatgataaactgcgactaatgagtgaatcagcacgtggtgaaggtggacgaatttggacatataaagatggtaagccttggtacttcttagaagagaaatatcctgattatggtaacttagtacctcgtgatatcgcaacgcgtgaaattttcgatgtatgtattaaccaaaaattaggtataaatggcgaaaacatggtatatcttgatttgtcacataaagatccacatgagttagatgtaaaactaggtggtatcattgagatttatgaaaaattcactggtgatgacccacgcaaagtaccaatgaagattttcccagctgttcactattcaatgggtggtctatatgtagattatgatcaaatgacaaatattaaagggttatttgcagctggagaatgtgacttctctcaacatggtggtaaccgcttaggtgccaattcattgttatcagcgatttatggtggtacagtagcaggtccaaacgcgattgattatatttcaaatattgatcgatcatatactgatatggacgaaagtatttttgaaaagcgtaaagctgaagagcaagaacgttttgataaattattagctatgcgcggtacagaaaatgcatataaattacaccgtgaacttggtgaaattatgacagcaaatgtaactgttgttcgtgaaaatgaaaaactgttagaaacagataaaaagattgttgaattgatgaaacgttatgaagatattgatatggaagatactcaaacttggagtaaccaagcggtattctttacccgtcaactatggaacatgttagtacttgcacgtgttattacgattggtgcatataaccgtaacgaatcacgcggtgcccattataaaccagaattcccagagcgtaatgatgaagagtggttaaaaacgacaatggcctcattccaaggcgcatttgaaaaaccgcagtttacttatgatgacgtcgatgtgagtttaataccacctcgtaaacgtgattacacaagtaagtctaaagggggtaaaaaataatgactgaacaatcagtgaaaaacactccacaacatgaaacacaatctaaaccgaaacaaaaaacagtaaaattaattattaaacgacaagatacaagtgattctaagccttatgaagaaacatttgaaattccatatcgtgaaaatttaaacgtcattgcttgtttaatggaaattagacgtaacccagttaatattaaaggtgaaaaaacaacacctgttgtctgggatatgaactgcttagaagaagtatgtggagcatgttctatggttatcaatggtcgtgcaagacaatcttgttctgcgattgttgatcaattagaacaacctattcgtttagagccaatgaatactttcccagttatccgtgacttacaagttgatcgttctagaatgttcgataacttaaaacgtatgaaagcatggatcccaattgatggaacgtatgatttaggtccgggaccacgtatgccagagaaaaaacgtcaaacagcttatgaattatctaaatgtatgacatgtggtgtatgtttagaggtttgtcctaatgttactgaaaataataaattcgttggtgcacaagcaatctcgcaagttcgtttgtttaatttgcacccaacaggatctatgactaaagatgaacgtttaaatgcattaatgggtactggtggcttacagcagtgtggtaattcacaaaactgtgttaatgcttgccctaaaggtattccattaacaacatccattgcagcaatgaacagagaaacaacattccacatgtttaaatcattctttggttcagaccatgaagtagaataaaaattaatcccttttgagttaaaatgttatgttcctttcaaaattaaattgaatggagatacacaataacttggaagggatttttttaataagcagattacatgacaatatgatagtgggctgatttaaaataaatattataatgacaaaaatggtaaacacagtgcataatactaaaatccaatgcttagttatgataaactaaaaattaaattaaaagtaaggatgaccgaatatgaataaaccaataggtgtaatagactctggtgtcggaggtttgacagtagctaaagaaattatgcgtcagttgccaaatgagacgatttattacttaggtgatattggacgatgtccatatgggccaagaccaggagaacaagtaaaacaatatacagttgaaatcgctcgtaaattaatggaatttgatataaaaatgctcgtgattgcttgtaatacagcaactgctgtagctttagaatatttacaaaagaccttatcaatcccagtgattggcgtaattgaaccaggtgctagaacagcaataatgactactagaaatcaaaatgtattagtactaggaacggaaggcacaattaaatctgaagcatatcgtacgcatattaaacgtatcaatccacatgtagaggtacatggcgttgcctgtccaggttttgtgccacttgtagaacaaatgagatatagtgatccaacaattacaagcattgtcattcatcaaacactgaaacgttggcgtaatagtgagtctgatactgtcattttaggatgtacccactatccattgctctataaacctatctatgattattttggtggtaaaaagacagtgatttcgtctggattagaaacggctcgtgaagttagtgcattgctaacatttagtaatgaacatgcaagttatactgaacatccagatcatcgattttttgcaacaggtgatcctactcacattactaacattatcaaagagtggttaaatttatctgtcaatgtggaacgtatatcagtgaatgactaggaggatttttaatgaaagagattgttattgcatcgaataatcaagggaaaataaatgactttaaagtaatatttccagattaccacgtaataggtatttcagaactaataccagattttgatgtggaagaaacaggatcaacatttgaagaaaatgctatattaaaatcagaagctgctgcaaaagcattgaataaaacggtcatagctgatgacagtggactagaagtttttgcattaaatggtgagccaggtatatactctgcacgttatgctggtgaaaataaaagcgatgaagcaaatattgaaaaattattaaataagcttggtaatacaactgatcgtcgtgcgcaatttgtttgtgtcataagtatgagtggccctgatatggaaacaaaagtatttaaaggtactgtttcaggtgaaattgcagatggaaaatatggcgaaaatggtttcggatatgatccgatattttatgtaccgaaattagataaaaccatggctcaactttcaaaagaacaaaaagggcaaattagtcatagacgaaatgcgattaatttacttcaagcttttcttgaagatgataaaaatgtctaaatggattattgtgagtgataaccatactgaatcaggcgttttatatcaaatttatgaaatgcacccagatgcagatgtatatttacatttaggagattcagaattcgcgtatgatgatacggaacttagcttatttaatagagtaaaaggcaattgtgatttttacccagaatttgaaaatgaagcggtcgcaaaatataatgacgtgaaagcattttatactcatggacatttatatcaagtcaatcgaacaagagatttattagctgaaaaaggacttgaattaggttgtttgtttgcattttatggacatacacatgtggcaaaatatgagtatattaatggtgttcatgttattaatcctggaagtatatctcaatctagaagttcaatggaagaaacatatgctgaagttattattgatgatcaaactttacatggcaccatcaatttcaaaaatcgacatcacgaaacaatcagtcatactactttttaaatagaagtagctatggctttttttagtttatagactgatttaactaggaggtcgtgtcatgaatgtttgtttaaaagtatttctgacaattttataagataattggaatgaataacacatttatgttatgaaaagaattgtaattttggagaatgtgattgttgataaccctatatggttgaatcatgttgattatttggttaaaagtgtattattaaaaagtataaaattaagattccaagaagtcaggaaatttgaaattttagttaaaatcatgaatcgtatacatatttaaaaggatttctaaagtcataaattatatcaataatttgatggttaaaatatggagtagcaaaattcttgaaattcagaaatgtagtgacacaaatattaatgtttagttaataaatagttaatgtagttttttgtatctgtctattattataaatatatacaaaataaatatttgaggataggtgttattaattatgaaaaagaattttattgggaaatcaattttaagcatagctgctattagtttaacggtatcaacgtttgccggtgaatctcatgcacaaactaaaaacgttgaagctgctaaaaaatatgatcagtatcaaacaaactttaaaaaacaagtaaataaaaaagttgtggatgcacaaaaagctgtaaactttttcaaacgtacaagaactgttgcaacacaccgtaaagcacaaagagctgttaatttaattcatttccaacacagttatgaaaagaaaaaattacaaagacaaatcgatctagttttaaaatataatactttaaaataattgatagaagccatgctatagagtgtggctttttgctatatccaaaggtataattattttataatattgtgtttatttgaatggtgagcttattgggataaataatataaataattacttaaaagtgaatgcaatagttgtttatgttttgaacaagcgaggtggctattgtgaaaaggaaatcgaatgtattaacaatcataaaaattgtaacggatatagtggcaaccgtgttaatcatacgtgctttattaaacagtcgtaaagatgctaaataaattggaagttacttaaaataaaaaagcacgccaatacgttagcattgttttctaacgtttggcgtacaactatttaattcagtatgttttttaataccaagtaatcgagtcgatttcaccgtttttaacaactttaatattttttctgttctcttctaaaggacgagttaagtcaaaagtatagtaatctctaggaccaccatctttaattctgacaactgctttcttcacatcaccttggcttaattttttaacaataaggtacagatcattaacagtttcagctttgtaaggagttagatttttatcagactctttcattaacttatcaatacgttcatcgtcctttttagcttgatctgctaaattttttgcgatttctaaacctttccattcataactaaagaaagctttagcatcattagtttgagttaaaagacctgcagcgattactgtagatgcgataatagtttttgtgatattttttttcataataagttctccctgtaaaataaatttgtacttactaatgcgagtacactgctattttacaaacggtttcatacatttaccagttaacacttcattaattaaaattaagtgcaaattaataaggtttaatgcaatcgaaaaagaataatgatgaatttgatggtattatttttatttgaggtattattgaatttgttgatagtataataatagtagtaaacgtcactcaactatgattgaataatttttattgctaaaacgatatttacatttctctacattttgtttgctaagttggatagacaaacactccaaattgttatacatatagctgttttgatatatattttttataaaacaaagaaatgattcatagtagagaagtaattaatatgtataattttacttataaagaaataagagatatattctaattatggttgatatgttatgattaatatataagttaaaaattatactatttaattgaattatgcattttcgaagtaaacataattcaacacttacatttttaaatagataaaatagtgtaaaatcacgtgccaagattactatagagtaggcattgagtattattggcaatcacttaagtgattgttatttttcgtggtcaataataaagatataaataaatatattgaggtcaaacgatgataattaaaattttaacaattctattactactttgtatattgagctatttggttacaaatagaaagaagccttttctgttcttaaagacactctttatgggtgtggtatttatctttataggatatatttcactggcaatatctgccgtaattatttatggtattattcaatttatcacaattgattttggtagttttttcttaatgggtattatattgatcttgatttcaagtatattccaattatttatagttagattactttttagaaaaaagaatgtcgatttgacagaggttgtcgttttagagcatttaattcaatggttcttagtttactttgcgatctatcaagcagtaaatgaaaaaatggacattaatgatattaatatcgacaatttccaatctgtcttttttgacgtgtctaatttgaatttagtaattctaccaacgttaatcattagctgggtcacaatatttaactatagaatgagaagttacaaataaaatctatgagattataccttcagacaccaacattcaaatggtgtcttttttgttgtgtggttttatttttgaaattcgaaaaagtagaggcatgaattttttgactagtgtataagtgctgatgagtcacaagatagatagctatattttgtctatattataaagtgtttatagttaattaataattagttaatttcaaaagttgtataaataggataacttaataaatgtaagataataatttggaggataattaacatgaaaaataaattgatagcaaaatctttattaacattagcggcaataggtattactacaactacaattgcgtcaacagcagatgcgagcgaaggatacggtccaagagaaaagaaaccagtgagtattaatcacaatatcgtagagtacaatgatggtacttttaaatatcaatctagaccaaaatttaactcaacacctaaatatattaaattcaaacatgactataatattttagaatttaacgatggtacattcgaatatggtgcacgtccacaatttaataaaccagcagcgaaaactgatgcaactattaaaaaagaacaaaaattgattcaagctcaaaatcttgtgagagaatttgaaaaaacacatactgtcagtgcacacagaaaagcacaaaaggcagtcaacttagtttcgtttgaatacaaagtgaagaaaatggtcttacaagagcgaattgataatgtattaaaacaaggattagttaaataaaacttcaatcgttgctgttatctggaaataattaattaaatgttatgttaatttttgttaatgaaaaaagtaatctatttaatgacaggttaatgtaattgtcctgaaattgactatatactcagtaagtatcaattttaaggagagcttataatgaaatttaaaaaatatatattaacaggaacattagcattacttttatcatcaactgggatagcaactatagaagggaataaagcagatgcaagtagtctggacaaatatttaactgaaagtcagtttcatgataaacgcatagcagaagaattaagaactttacttaacaaatcgaatgtatatgcattagctgcaggaagcttaaatccatattataaacgtacgattatgatgaatgaatatagagctaaagcggcacttaagaaaaatgatttcgtatcaatggctgatgctaaagttgcattagaaaaaatatacaaagaaattgatgaaattataaatagataataaataaaacaggttgagacaaaaaatggtcttaacctgttttcaatttgcatatgtgataaattctatatcaaaatgcttatgtataatgaatgacatttaaaagtaggggagacaaatataaatacaatagttcctaggattactctcaaaataactatatcaattatttactttgctctcctattttttaaaatatgtacatgtttaaacaatcaaaagtgtacaatattaaattatcatttccagttctagtgctatattggtagtagttgactaaatgaaaataagcttataacaagttttttcaatactcgtggggccacaacagagagaaataggatcaccaattccaacagacaatgcaagttggcggggccccaacagagagaaataggatcaccaatttcaacagacaatgcaagttggggtggggcccaacacagaagctggcgaaaagtcagcatacaaaaatgtgcaagttggcggggccccaacagagagaaataggatcaccaattccaacaaacaatgcaagttggcgggggccccaatatagaagctggcgaaaagtcagcttacaaaaatgtgcaagttggcggggccccaacatagagaaattggaaccccaatttctacagacaatgcaagttggggtaggacatcgataaagaaatactttttctttagcaattagtatttcttatgcatgagctttactcatgtattcattttttaagtacacattagctacagctaatgataaagaaccactacataataaatcattagtggttctttatcatttctatctcactcttttactggaagaaaaagtttacgtttgtagaacatgccacaataccaaaaataattaagaaaaataagacgataagcatgatgacacttttcaaacaacctctatcagtttctttcgattttctttgttgaacctttttataatcttcaagtagttttgcggcttttttatttatatgtttattcatgatgttgactccttataatatatgtttaattcattaaaatagttgaaaacatgacttgaaataaagatataaagctaaagtaaggatgttcaattgtttcaaattttatgaaagtataacgttaaatatgttaatttgatgatgatatttgctttttattttccaaatggaatttacttaaactgatgcattaaaatattaatgaagcactagaatacataaatgaatagtaatggtgcacagtatagaataattaaggctatattaagtataaatatcgttaactgtaagctatctttagttttaatataaactattaggataatcgacgtaagaagaatcatatatattaatgatgaagaagtccatacaaaatccgcatcatttgttgttaataatgggactataattaatccgaaattaatcatgcatgctatatatactataatgttatacacaatgttaatttttgttcaccaccttatacttctattttaaaaacttctttataatgatatattgtttaatgttgaaataattagattatctaattttcatttgctttacatgtaaaaggctatatatagtatgctctttatgattctaaatgctttttaatatttaatgctcatcaacatttggattttgaatattcaattcaaaaactttattagctacgtcaattgtaaaatcagaaccatagttgacatgagctacttttaattttccatctaaataatagattgcgattgcaacatcgtaaaattcgtcaatgacaaataaactcttttcgtttgttacaacctcatgctctcctgagtatacaacgttaatttcccaatcattaaaaaccatttgttaacctccttgaacatttaaattgattcaacttaagtttaacttattcatacaacttcgtacaatatctagatgaacattaattgtatttctagaaatctttttcaattatatgtactaattatacttttaaatttcttatttcagtatagttttaaaacgattttaaaataattctgcaaatatattaacacataatgtgttcaaaaagttttgaacaatttcaaaacttttatataaagggtttgacaacatggaattcaaatttcttattttaaaaattacctcatatagtgtcatgtttagtctaatttttaagtcaggaaagcaaatcaagtagatagtttaaattaaaaatatcataagttaattaaactaaattcagtataaaaattagccgaaaaacatcatttctgaagttatcggctaaagttataaattatatttatttgtacatgaacaaataatttacattaatttgtcatttcttctttttcccaatcgattttatatctttctgaagaacgatctatccatttatctttagtattggtacctttccaatttgttgaagtccagtgcaattggtagtcatcacgaactcgttcgtatattacatctatatttgtttgttgtttggatgcttttctatccatagtaataactgtagcgaagtctggtgaaaaccctgaagataatagagaacttgctttgttaggatcaaggaagttatctgctgctttcatagagccatttctagttttcatgaaaagttgattgccatataccgggttccaagaatctctatcatatggtccccaattttgattcaccatattgttaaatatcactttccagcctacttttttatcagttgggctctctaaaattgttttgaaatcaggttgaacatatttcagtgtatgaccaatcgaaacatttgcaccaataaggccgccaatttttcctgtatcatcaccagtaacattaccgttgaatccataagttaaagtactcatatactcttttgtatcaatcgaatttcttggatagtaatcagatatttgagctacttcattatcaggtagttgcaactgtaccttaaaggctgaaggccaggctaaaccacttttgttagcaccttcttcgctataaactctatattgaccagcaatggtacctttcgttctaataactagcagttttttattatgatttttatcatcgataaaactataaaatacttttttgtgcatgccattttctttatcataagtgactaaatcacctgtttttactgtagtattgcttccaatatctgtagtaccggttttaatattaatatcagaatctgcggcattagcgacaggattcattaatatggaacctagcaatagtgttgttgttactgagctgactatacgtgttttcattttcatcatccttctattttttaaaacgatttgaggaaacaataatcaatatgtcaatttagaatattgcagttgagacatatcaaatatttataatcgtttatattagtatatttaatgtagcaactgataaattactgagtgatgatgagtgattattttaagaatatgtttttaacttttatttaaaatttgaaaggaagcatttcaatttcgagggttagtcaaagttgaataaattctttatgaaacaaggaaaagacatagctaattttattgattaatttctttaaaactaatgatttgtttgatttaaaaatgtaatcgattacaatataaaaatacaaatatcttagaattaaatcaattaattaactattaaataaaaattaactatatattaactagtgtaaattaataaatagaaatagagaaaaagggtattaattatgtttggaatttcgtcgggaataaattttgccattacatagaaatatctaatagataacgaaaaagtatcgtatgtatttttaatatagtgtaaaatattatatgtaaaataaaatgtaggtttttagttagaggcattataagaaaattttgagtataggttagcttttaattatgaatcttattgaaatttgattaataaaaatatgataggggattaaaatgaaactattttatatcgtatttcttattattatatggctgaatatatttttaggaaatgaaatcatccatacactgactgttttaataacaacattgtatattgttaattcaagaaaggggattaaaaatgacagagttgaataatattataaactctcttcaatctttgtttgagtctgaatcaggctataaaatttcgaaaaattcaggagttccatatcaaacagtacaagatttaagaaatgggaaaaccaaactagaagatgctagatttagaacgattattaaactttatagttactatgtctcattaaaagaacactaatcatgggacaataaagtattgctataataatttaatcattaaatgaaggaatagagcctaagacataataaatcaatgtcttaggctctacaatattatattggtagtagttgaccgaatgaaaatgcccatgtaacaagcatttttcaattataggcggggccccaacatagagaatttcaaaaagaaattctacagacaatgcaagttggggtgggccccaacacagaagctgacgaaaagtcagcttacaataatgtgcaagttggcggggccccaacatagtgaaattggattcccaatttctacagacaatgcaagttggcggggccccaacatagaagctggcggaaagtcagcttacaataatgtgcaagttggggagtgacaacgaaataaattttataaaatactatttctgtcacattcctactcccaattccatttaaatatatagaaaattttacctattatatacatcatacactttaaaaattatcatttaaataatctgatttggaattaaagtgcatgaagtataagtcaccctcatatactaatcaaagaggacgtcaacagttattttattaggatttttaacataaacatttgctagatctgaatgtaatcttttgcttaaatcaatagtgtagttattaccgccaccggtgatcttaagcttacctttattacgattttcgttatataatattttattttttattaacgcttctcgtgcacggaaatcgatttctttcaatgttaatactggtttattgccttggtatattttatgcgcaccaataatcgtttgtagtttatctttgtattgcacaaaaagattataagttttatcagaaggttttgcggctggtgtaacgccacctgtaaatgtctctctataagaccaccataactgatcagtatctttgtcttttagtccaaacacatctacgtaacgatcttttaactgattaatatttccccaactttcagcgccccataaagatatatgtgctgaccatgaatatctcttaagttcaacataaatgtttccattatcatattgatatagccatttatttgaaaatgaaaaatgaggctgtgtgtaatatttaattaattcattgatgttagtttcatcttgaccaatgctataagctttagcttcagagtaaaaactaaatactggtttttgattttgaggtaatacagtacctaatagtaataatgttgtcgttaaaattatatttttcgtgatgttcttactcattagaacatctcctttcagaggaatcatgatacgaggaataagaaatttaaatgtgagcgaagtcaatatagtatttgcgattatttttattaactccattattattgttagtttgatttttcgaggataacttcaatttttgcattttgaggttttttaacatatctatttgcatcagttgatggcaaccttttacttaaatctattgtgtagttattgtctgcacctgttattttaatttgtcctttattataagaattattatataattttttacttttaattaatgtttgacgaatacgaaaatctaattcttttaaagttaaaacaggcttattgccttcataaactggaaatccgccagtaaacgtttctgctttatctttatatgttacattcagtttatagtgtttatcgttagatgttgctgcaggagtaacaccaccagtaaacgtttcttgagataatgcaaaagaatcaatggtttcttggtcttttatgccaaaaatatcaacgcttttatttcttaattggttgatattgccccaactttcaggtccataaacttgaatatgactataccaagaaaactgtaacaacgttgcatgaatcgtaccgttatctttttgccataacgtactgttagagaaggttaaatatttttgcgagtaatatttagttaactcattaacgttagtttcgttttgatttatataataagctttcgcttcagatgaagaattgataggtgtattaggaaattgtgtagatgctgtacctaatagtaacaatgttgttgataaaataatttttttcgtgatgttattgttcattcgaatttctcctttgagtattgttggaatgtttaattataaaaaggggttaattagataattgaaattatccgcatttacaaaaggtaataggttagttagatttttcgagtatgacttcaatttctgcattacgaggatttttaacataacggtttgtgtcagttaattttaactttttacttaaatcaatcgtgtaattatttccatcaacagttatcttaatttgacctttattaaattctccgttatataactttttattttttattaatgtttgacgaatacggaaatctaattcttttaaagttaatactggtttatttcctttgtaaaattcatgtccaccgatgatagtttgttgtttatcactatattttaaaaatagtctataaggcttatcagatgaagtagctgctggcgtaacaccaccagtaaatgtttcatcataagtccagtaaccttcaactgtgtcctcatctttagttccaaatatatcaacgtatttatttcttaactgattaatgtttccccaactctcggatccaaacacttgaatatgactataccaaacccacgtttgcaatgttgcatgaatgctaccattgggcttttgccataaccattttccagataatgaaaaatgcggctgagtgtaatatttgattagttcattgatattagtctcgttttcactgatattataggcttttgcttcagatgaaaaactgattggtgttttaggaagttgtgttgatgtagtttctaaaagtaacaatgctgttgataaaactaatttattcatgatgttctttttcatatgaaaatctcctttgcgtgaattacccaaagtatataagctattacaccgattcggaattaaataaaagctaaaactatgttaaataaacttaaacagttagtagtgttatttaagcaaaacttatcatttttaagttttggacagaaacagtatctaataaagtaggcgggagttatatattaaaaacgatacgttagaattattctctaatcaattgtattaaattgtttgataattgaattttctaactacttgaaaaatagttatactttaaatgtagtacttattttaattatttcctactacttaaatttaatattaataaaatgttcatttaattattgataaaatattacaaattttaatagtaggttgtgtttattttgtatgcgcttacaatttaggtgtaactaaaataaaaggagttgttattaatgaaaaatttacgaaacagaagttttttaactttattagacttttcacgacaagaggtagaattcttattaacactctccgaggatttaaaacgtgctaaatatattggcactgaaaagcctatgttaaaaaataaaaatattgcactgttatttgaaaaagattctacaagaacgcgatgtgcatttgaagttgcagcgcatgatcaaggtgcaaatgtaacttatttaggcccaactggatcacaaatgggtaaaaaagaaacaactaaagatactgcacgtgtgcttggtggaatgtatgatggcattgaataccgtggtttttcacaaagaacagtagaaactttagctgagtattcaggcgtaccagtgtggaatggtttaactgatgaagatcatcctactcaagttcttgctgatttcttaacagcaaaagaagtcttaaaaaaagattatgcagatattaactttacatatgttggagatggtcgtaataacgttgcaaatgcattaatgcaaggtgctgccattatgggtatgaacttccatttagtttgtccaaaagaattaaatccaacagatgaattattaaatcgctgtaaaaatattgccgctgaaaatggtggcaacatattaatcacagatgatattgaccaaggtgtaaaaggttcggatgtaatttacactgatgtttgggtatcaatgggtgaacctgatgaagtatggaaagaacgacttgaattattgaaaccatatcaagtaaataaagaaataatggataaaactggtaatccaaatgttatttttgagcattgcttaccatctttccataatgctgatacgaaaataggtcaacaaatttttgaaaaatatggtattcgagaaatggaagttacagatgaagtattcgaaagtaaagcttcagttgtattccaagaagctgagaacagaatgcatacaatcaaagcagtcatggttgctacattgggtgaattttaaatgatataaggaagtgaatatgatggcgaaaatagtagtagcattaggtggtaatgctttaggaaaatcacctcaagaacaactcgagcttgttaaaaatactgcgaaatcattagtaggattaataacaaaaggacatgagattgttattagtcatggtaatggaccacaggttggaagcattaatttgggacttaactatgctgcagaacataaccaaggtccggcatttccatttgctgaatgtggcgcaatgagtcaagcttacatcggctatcaattacaagaaagcttacaaaatgaattgcattctattggaatggataaacaagtggtaacactagtgacacaagttgaagttgatgaaaatgatccggcatttaacaatccttcaaaaccaattgggttattttacaacaaagaagaagctgaacaaattcaaaaagaaaaaggatttatatttgttgaagatgctggaagaggatatagacgcgttgttccttcaccacaacccatctctattattgaattagagagtattaaaacacttattaaaaatgatacactcgttattgctgctggtggtggaggtataccagtaattagagagcaacatgatggttttaaaggtattgatgcagttatagacaaagataaaacaagtgcgttgttgggtgctaatattcaatgcgatcaattgattattttaacagcaattgattatgtatatattaattttaacactgaaaaccaacagcctttgaaaacaacaaatgttgatgaattaaaacgatatatagacgaaaatcaatttgcaaaaggaagtatgttaccaaaaattgaagcagccatatcatttattgaaaacaatccaaaaggaagtgtgcttataacatcattaaatgaattagatgctgccttagagggtaaagtaggtactgtgattaaaaagtaattgaattgaaacgcttttcaattactatatgtcaaatgcatgatttttattatttatgtgcaccccctgaaaataatgcctctattttgatgcggggtgcactttcttaatttatatttataaaatctttaaggtagaaatgctaggttaaatgtcgaaggagatgaaaccgtggaaaatacaattaatgaaagtgaaaagaaaaaacgatttaaattaaaaatgccaggtgcatttatgattttattcattttaacggttgttgcagttatagcaacatgggttattcctgctggtgcatattctaaactttcttacgaaccttcatcccaagaactaaagatagttaaccctcataaccaagtgaaaaaggttccgggtacgcaacaggaactagacaaaatgggggttaaaattaagattgaacaatttaaatcaggtgcaattaataagccggtatcaattccgaatacttatgaaagattaaagcaacatccagctggaccagaacaaataacaagtagcatggttgaaggtacgatagaagcggtcgatatcatggtattcattcttgtactagggggacttattggcgtagttcaagccagtggttcttttgaatcgggattgttagctttaacgaagaaaacaaaagggcatgaatttatgctaattgtgtttgtatcaatactaatgattatcggcgggacattatgtggtattgaagaagaagctgtagcattttatccgattttagtccctatatttatagcgttaggatacgattctatcgtttcagttggtgccatattccttgccagctctgtcggtagtacattttcaactattaacccgttctcggttgtaattgcctctaatgccgctggtacaacttttacggatggcttgtattggagaataggtgcttgtattgtcggtgcgatttttgttattagttatttatattggtactgtaaaaaaattaaaaacgatcctaaagcgtcatattcttatgaagacaaagatgcttttgaacagcaatggtctgtattaaaagatgacgatagtgcccattttactttgcgtaagaagataatccttacattatttgtactaccatttccaattatggtatggggagttatgacgcaaggttggtggttcccagttatggcttcagcatttttaatatttacaattataataatgtttattgctgggacaggtaaatctggattgggagaaaaaggaactgtagatgcatttgtcaatggtgcatcaagtttagtaggtgtatctttaattattggtttagctcgaggtattaatttagtgttgaatgaaggtatgatttcagatacaatcttacacttttcatcatctttagttcaacatatgagtggaccattatttatcatcgtattactatttattttcttctgtttaggttttatcgtgccatcatcttctggcttagcggtattatcaatgcctatctttgcaccactagctgatacagtaggtataccaagattcgtcatcgttacgacatatcaatttggtcaatatgcgatgttattcttagcgccgactggacttgttatggccacactacaaatgttaaacatgcgatattcacattggttccgatttgtatggccggtagttgcttttgtattgattttcggtggcggagtactaattacgcaagtactaatttattcataatttgaaatgctatattataaaaaatactaatggggttttatgcatctcgtaggtttgtagaaatactaaactaagcgaggtgcattattatttttgattaagaaaataatgacggtaatgataacactagtaagtaattgatacaatgctctatttaataatgatatttttaaaatttgtttttaatgtaatgttagatctatggtatattatatttatcgtggtaaatatgtatttgctgtaaacagtttttgtaacacatgatacatatggttgtgaaaatagcatatataaaggatggctataaatgacacatttgacaaaggttttagatacactaactggaatatgcgtagtattattatttagtaaatattttgtggcgtatgcaaatatggtgtttgattggaatttaagatggtatttgctagaaaacataccacatttgccaattatattatttattctgatgtttattttcggagtaccttctgaaatgataaaagataggcaaaggaaaaataacggtgtttaatttatcgatatttagaggtgataaaatttgtcaactattacaaagactaaaataaaaatctttattaattattttattggtatattagccttggcgtttgctgcttatatattatttaaataaaggttagagtgaaacgtgtttatgaactagacgttctagtatagttactatagctttagtcagaaggtatcattgataagatcatattaaatcaaagaggcattgatatacactaaaaagaggcaagattacctgcctctttttagttattaaatatacgtgttaattcttggtaatagtgttactgagacgcattacgaagaaatttatcttgtttttccttttttaaaaagaagtgaagatatcctataaagactctaagtactattacagtggctaataacacttcgataaacaaaagacctttccaaatgtctggaaacataagtacaggcaaactgttctttaaagcagttgctgagattactaaagggaatgtgaaagctgaaaatacgggcgaaaaaggttcttttagtaatttaggcaattgtataatgatataaaaataaaatatttgagctaatagtaaaaatataattacgataaaagcattcgccttaggaaaagctataacatatgctgcagcgactaaagaaaatggtgcacaaattgtcgatgtgttcggtttgattgacgtctgcaatggaaatgcttttaatcgcttgaaaactataggtaagacaatacaagtagctacaaagccatatattactgttaattgacctatgaaaaaatatccgctaacgggtgccgtcaatcctgcgatagcaataccaataaaaagtacagtccacgaaggataaacatttttaagtgaaaaatcttttaaatattttattgaaaaaataatcatatgcgtcataattcccacaaggcataaaatccaaataggcgttattaagctattgataaaagttatgttactaaaaaatgtatttaaataagtagtacctaaaaagccagacatgaaaaatgttgtgaacactgatgaaactagaggactgtttaattgttctttcacattattaaaatatttgatcatagtacataaaaggtgaatccaaatcaagaaagcaaagattccgcaaacagcgtttaaagtaagagataagtcttttaatagattacccaggcctaataatcctaagactagtcctgacgttactagaggtgctttttgaagtctcatgatttacaacctttcttatgtgattttcttcactaattatatcatgatagctatggccaattaataagaagagtgtgtactattacgttattagagtatgtatattggattgatagacacataattgacatttaaatctcaaaattaatgatatttgaggtatgctttgcaacctaaatattggaatatgtggaaaagtaattatttaatttaaatgatgattgaagatttacaagggggtgtacaaaatgagaaatcaaattcaaaaactattagacagtgatttgagcagtttacatatatcgaaacaaacaggagttccacaaagcacaatacacagaatgagaaaaaatgaaagatcattagacaatatgtcattgaaaaacgctgaactactttataaatttgccaatagtatatttagcaatgaaaattaagaagaataattagtgagttaaataattaaaaaaccacgtctcgatggacgtggttattttttttagatgtatataattataattataggatttcgggcccctgaaaagtccctaaaattttgaatagtatcaaaatctataggaataatataataataaaaatctctacgcatgcaaatggtgagtgttaaaaatcttggtgtagtgttggtgtagttcaggtgcagtatagatgaaatttgagcacaaaattacttaattaaaaatgtataaacaagtgtcagacgcgtgtcaattgtgtgtcaaaaaattctataacgaataagcatgcttgttttaattactgtattttcggggcttatgcgggggacgttttggtgacgcatcatactatattactgaaattcaaaacaaaaagagccccgtaatcacggaactcttttgtttggtaatgcgtataaaaatacctataaacgtcctgggagggattcgaacccccgaccgatggcttagaaggccattgctctatccagctgagctaccaggacacgtttaacaacacaagaattattatatctaaatgaacttaaattagcaataccttgtaaataaaaaatgtttatatttttcactattatagagctatttatctaaaaaggttcgataagacttaaatacgaattcaggcaacttaattgtgttaaatacagttttgaatgcctaactgtatttcttttctctttaaaatacagttaagtacattataagatgttgtgcggataaacaaactaattgtatcaaatttattttaaaataacaacaacaaaacgataagcgaataacatttcggtgatttaaaagctacgcacgtttttgttatcttcaaatttaaattttaaggagtgttttcaatggaaggtttatttaacgcaattaaagataccgtaactgcagcaattaataatgatggcgcaaaattaggcacaagcattgtgagcatcgttgaaaatggcgtaggtttattaggtaaattattcggattctaatttcaatatgttatgtaagtaatcagtattatttcaaaggtgagggagagatttaaatgactggactagcagaagcaatcgcaaatactgtgcaagctgcacaacaacatgatagtgtgaaattaggcacaagtatcgtagacatcgttgctaacggtgtgggtttactaggtaaattatttggattctaatataataactaatattctttaaaataaactgggtgagcatactttaatgttatgcactcagtttattttatttgcagaaatttgagcctctgttaagatttagatacatagacaatataggagatggggaaattgggatataaaaatattttgatagactttgatgatacaattgttgatttttatgatgcagaagaatgggcgtttcactatatggcgaatgtttttaatcataaagcaacaaaggatgattttttaacatttaaaaaaatcaatcaccaacattgggaagcttttcaacaaaataaattaacgaagtctgaagtattatcagaacgatttgtgaattacttcaaacatcatcaaatggaagttgatgggcatcgtgcagatgtgttatttagaaatggattagcagaagctaaagttaaatactttgatcaaacattagaaacaattgtcgaattatcgaaaagacatgatttatatattgttactaatggtgtaaccgaaacgcaaaagagaaggttaaatcagacgccgttgcataaatatattaaaaagatatttatatctgaagaaacaggatatcaaaaacctaatccggaattttttaattatgtttttaatgatattggtgaggatgaaagacagcactcgattatagttggagattctttaacatctgacattctaggtggaatcaatgcgggtatagctacttgctggtttaattttagaggatttgatcataatccaggaattatacctgattatgaaattaattcatggaaacaactaaatgatattgtacgttaagacaaataatttgaaaatgatttacttatattagcttaagaaagtaattgtaaaaaagacactacgaaaagatgcattttcatgctcgtagtgtcgaatattattatcttatggtttccacaataagacatcatgtccctctatatttttagcttccacatctgtaaatccatgatgtaaaaagaaatccttagaatcatttctgccaatggctttaattggcatattgaaactctttgcaaaatcaatcaattctgaagcgtaccctctgttttgatattttggtaatacttctaacttccataataatatataatcttcaaaatctgggaagtagatttcttcgacatcacctttttttagtaatgccattctagctcctaattgatctccgacaaatatgccataaaatggtgaatctgaacttgcatcaatcatttgaccgtttaactcattgaccatgtataagtctttgttgccaaacgctctaaagttttcgaataattcgtcagttttgtaattaatttcaagacgtttgatttcactcatatttatctaccccttatttgtttactactattattatacattaaaccacttgtgtttttcattgatttgaaaatgtaaaacaatgaatattataaattttccatgattaaattgattttcaagccgtaaaattgtcaatcaccggtatagactttatactatagtttgtaatcgcgtacttaaggagaaaaaacatggactgtaaagtagttagtttaaatgaaaaagatcagtttataccaaaaataaagagcagtgaccctgtaataacaggattatttcaatatgatgcagctcaacaaactagttttgaaaaaaggatgtctaaagaaaataatggaagagaagcggcattagcgaatgttattcgtgaatatatgagtgatttaaagctttcaagtgaacaagaattaaacatacaacatttagctaatggttcaaaagttgtgattggtggacaacaagcagggcttttcgggggaccattgtatacattccataaaatattttcaatcattactttatctaaggaattaacggatacacataagcaacaagtagtaccagttttttggattgcaggagaagatcatgatttcgatgaagtgaatcatacatttgtttataacgaaaatcatgggtcgctgcataaggttaaatatcatacaatggagatgccagagacgactgtctctagatattatcctgataaggctgagttgaaacaaactttaaaaacgatgttcattcatatgaaagaaactgttcatacacaaggtctactggagatttgtgacagaattattgaccaatatgactcgtggactgatatgtttaaagcactactgcatgaaacatttaaagcatatggcgttctatttatagatgcgcagtttgagccgttaagaaaaatggaagcgcctatgtttaaaaagattttgaaaaaacatcagttgcttgatgatgcttttagagcaacacaacaacgtactcaaaatcaaggcttgaatgcgatgatacaaacagatacaaatgttcatttattcttacatgatgaaaatatgcgtcaattagtttcgtatgatggtaagcattttaaattaaataaaacagataagacatatataaaggaagaaattataaatattgcggaaaatcaacctgaattattttctaataatgtagtgacaagaccattaatggaagaatggttatttaacacggtggcatttgttggaggaccgagtgaaattaagtactgggctgaactaaaagatgtatttgaactatttgatgttgaaatgcctatcgtgatgccaaggcttagaattacttatttaaatgaccgtatagaaaaattactttcgaaatacaatattccattagaaaaagtgttagtcgatggtgttgaaggagaaagaagtaagtttattagagaacaagcatcacatcaatttattgaaaaggtagaaggtatgattgaacaacagcgtcgtctaaacaaagacttattagatgaagtggcggggaatcaaaataatattaaccttgtgaataaaaataatgaaattcatatacaacagtatgattatttgttaaaacgttatcttttaaacattgaaagagaaaacgacatcagtatgaagcaatttagagaaattcaagaaacactccatccaatgggaggattacaagaaagaatatggaatccacttcaaattttgaatgattttgggacagatgtgttcaagccctccacctatccaccactttcttacacttttgatcatattattataaaaccttaatataccaagggtttagcccgatttatcttaatgataaatcgggcatttttttgttttttaaaataaatttcacaaattttgtataaatagtggtggatagtggggagatgtggtaaattatatataaggtgaggtgataaaaaatgttcatgggagaatacgatcatcaattagatacaaaaggacgtatgattataccgtccaagtttcgttatgacttaaatgagcgttttattatcacaagaggccttgataaatgtttattcggttacactctagacgaatggcaacagattgaagagaaaatgaaaaccttacctatgacaaaaaaagacgcacgtaagtttatgcgtatgttcttctctggtgctgttgaagtagaacttgataagcaagggcgtattaacatccctcaaaacttgaggaaatacgctaatttaactaaagaatgtacagtaatcggtgtttcaaatcgtattgagatttgggatagagaaacttggaatgatttctatgaagaatctgaagaaagtttcgaagatattgctgaagatttaatagattttgatttttaaaatggaggaattgaagtgtttcatcatatcagcgttatgttaaacgaaaccattgattatttaaatgtaaaagaaaatggtgtgtacattgactgtacgctaggtggagcgggacatgccctttatttactaaatcaattaaatgacgacggaagattaatagcaatcgatcaagaccaaactgcaattgataatgctaaagaggtattaaaggatcatttgcataaggtgacttttgttcatagcaacttccgtgaattaactcaaatattaaaagacttaaacattgaaaaagtagatggaatttattacgacttgggtgtttcaagcccacaactcgacattccagaacgaggattcagttatcaccatgacgcaacattagacatgcgtatggaccaaacacaagaactaacagcatatgaaattgttaacaattggtcatatgaagcgttagtgaagattttttatcgctatggcgaggagaaattttcaaaacagatagctcgaagaatcgaagcacatcgcgaacaacaaccaataacaacaacattagaattagttgacattataaaagaaggtattcctgcaaaagcaagaagaaaaggcggacatcctgcaaaacgagtatttcaagcactacgaattgcagtaaacgatgaattgtcagcttttgaagattcaatagaacaagcgattgaattagtgaaagtagatggcaggatttcggtaatcactttccattctttagaagatcgtttatgtaaacaggtgttccaagaatatgaaaaaggtccagaggtaccaagaggattaccagttataccagaagcatatacacctaagttaaagcgtgttaatcgtaaaccgattaccgctacagaagaagatttagatgacaataacagagcacgaagcgcgaaattacgtgtagctgaaatacttaaataaggagcaatttataatggctgtagaaaaagtgtaccaaccatatgacgaacaagtttataatagtataccgaagcaacaaccacaaactaagcccgaaaagaagactgtttcgagaaaagtggttgtacaattaactaaatttgaaaaagttttatacataactttgattactgtaattgctatgttaagtatttatatgctatctttaaaaatggatgcgtatgatacgcgaggaaagattgcagatttagattataaaatagataaacaatcaagtgaaaacagtgctttacaatctgaaatcaaaaagaattcttcttatgaacgcatatacgaaaaggctaagaaacaggggatgagccttgagaacgataatgtaaaggtagtgcgtagtaatggcgaagcaaaaaattaaaattaaaaaaaataaaataggggcagtcctacttgttggtttattcggactgctcttttttatattggttttaagaatttcatatatcatgattactggacattctaatggtcaagatttagtcatgaaggcaaatgaaaagtatttagttaagaatgcacaacaaccagaacgaggaaagatatatgatcgtaatggtaaagtgctagcagaagatgtagaaagatataaacttgttgcagtaatagataaaaaggcgagtgccaattctaaaaaacctaggcatgtagttgataaaaaagagactgcaaagaaattatctacagtcattaatatgaagccagaggaaattgaaaagagacttagtcaaaagaaagctttccaaattgaatttggacgcaaaggaacaaatttaacgtatcaggacaaattgaaaatagagaaaatgaatttgcctggtatttctttattgcctgaaacagaacgcttttatccaaatggcaattttgcatcacacttaattggtagagctcagaaaaatccggatactggtgaacttaaaggtgcacttggagttgaaaagatttttgatagttatttaagtggatctaaaggatcattgagatatattcatgatatttggggatatatcgcaccaaatactaaaaaagagaagcagcctaaacgtggtgatgatgtccatttaacaatcgattcaaatattcaagtatttgttgaagaagctttagatggcatggttgaaagataccagccgaaagatttatttgcggttgtcatggatgccaaaactggagaaattttagcatacagtcagcgaccaacatttaatcctgaaactggtaaagactttggtaaaaagtgggcaaatgacctttatcaaaacacatacgagcctggatcaacatttaaatcatatgggttagcagctgctattcaagaaggtgcttttgatcctgataagaaatataaatctggacatagagatattatgggttcacgtatttcagactggaatagagtcggttggggtgaaatcccaatgtcactcggatttacttattcatctaatacattgatgatgcatttacaagatttagttggtgcagacaaaatgaaatcttggtatgaacgatttggatttggaaaatcaactaaaggtatgtttgatggagaagcacctggtcaaattggatggagtaatgagttgcaacaaaaaacgtcatcatttggtcaatcgacaacagtaacacctgttcaaatgttacaagcgcaatcagcgttctttaatgatggtaatatgttaaaaccatggtttgtgaatagcgttgaaaatcctgttagtaaaagacaattttataaagggcaaaaacaaatcgcaggcaaaccaataacaaaagatactgctgaaaaagttgaaaagcaattggatttagttgtgaatagtaagaagagtcacgctgcaaactatcgtattgatggttatgaggtcgaaggtaagactggtacagcacaagtcgctgcacctaatggtggtggatacgttaaaggtccaaacccatattttgtaagttttatgggtgacgcgccgaagaaaaatcctaaagttattgtatacgctggtatgagcttggcacaaaaaaatgaccaagaagcttatgaattaggtgttagtaaagcgtttaaaccaataatggaaaatactttgaaatatttaaatgtaggtaaatcaaaagatgacacatctaatgcagagtatagtaaagtgccagatgttgaaggtcaagacaaacaaaaagctattgataatgtgagtgcaaaatcattagaaccagttactattggttctggcacacaaataaaagcacaatctataaaagcagggaataaagtcttacctcatagtaaagtactgttattaacagatggagacttaactatgcctgacatgtcaggatggacgaaagaagatgtcattgcttttgaaaacctaacaaatattaaagtaaatttaaaaggtagcggttttgtgtcccaccaatcaattagtaagggacaaaaacttactgaaaaagataaaatagacgtagaattttcatcagagaatgtagacagcaattcgacgaataattctgattcaaattcagatgataagaagaaatctgacagtaaaactgacaaggataagtcggactaacaagaatggctacattaaattaggatgtattgtcactatttgtttttactaaagtaatgctgtgatagaaaacaacatcttcatttaatctttataaataagtgttgatagagaattttaaggtagacgaggtcagattaacttgtttgttataggcaaactttttatactggcctcttatgccgtaaaaaagaaaaattataaattttgattacaactttgtttatttaattgaaaaattgataatatattagtggttaaaaaagtctggattaagaagaggagatagttatgatttttgtatatgcgttattagcgctagtgattacatttgttttggtacctgttttaatacctacattaaaaaggatgaaatttggtcaaagtattcgagaagaaggtccacaaagccatatgaagaagactggtacaccaacgatgggtggactaacatttctattaagtattgtgataacgtctttggtggctattatatttgtagatcaagctaatccaatcatactgttattatttgtgacgattggttttgggttaattggttttatagatgattatattattgttgttaaaaagaataaccaaggtttaacaagtaaacagaagtttttggcgcaaattggtattgcgattatattctttgttttaagtaatgtgtttcatttggtgaatttttctacgagcatacatattccatttacgaatgtagcaatcccactatcatttgcatatgttattttcattgttttttggcaagtaggtttttctaatgcagtaaatttaacagatggtttagatggattagcaactggactgtcaattatcggatttacaatgtatgccatcatgagctttgtgttaggagaaacggcaattggtattttctgtatcattatgttgtttgcacttttaggatttttaccatataacattaaccctgctaaagtgtttatgggagatacaggtagcttagctttaggtggtatatttgctaccatttcaatcatgcttaatcaggaattatcattaatttttataggtttagtattcgtaattgaaacattatctgttatgttacaagtcgctagctttaaattgactggaaagcgtatatttaaaatgagtccgattcatcatcattttgaattgataggatggagcgaatggaaagtagttacagtattttgggctgttggtctgatttcaggtttaatcggtttatggattggagtgcattaagatgcttaattatacagggttagaaaataaaaatgtattagttgtcggtttggcaaaaagtggttatgaagcagctaaattattaagtaaattaggtgcgaatgtaactgtcaatgatggaaaagacttatcacaagatgctcatgcaaaagatttagaatctatgggcatttctgttgtaagtggaagtcatccattaacgttgcttgataataatccaataattgttaaaaatcctggaataccttatacagtatctattattgatgaagcagtgaaacgaggtttgaaaattttaacagaagttgagttaagttatctaatctctgaagcaccaatcatagctgtaacgggtacaaatggtaaaacgacagttacttctctaattggagatatgtttaaaaaaagtcgcttaactggaagattatccggcaatattggttatgttgcatctaaagtagcacaagaagtaaagcctacagattatttagttacagagttgtcgtcattccagttacttggaatcgaaaagtataaaccacacattgctataattactaacatttattcggcgcatctagattaccatgaaaatttagaaaactatcaaaatgctaaaaagcaaatatataaaaatcaaacggaagaggattatttgatttgtaattatcatcaaagacaagtgatagagtcggaagaattaaaagctaagacattgtatttctcaactcaacaagaagttgatggtatttatattaaagatggttttatcgtttataaaggtgttcgtattattaacactgaagatctagtattgcctggtgaacataatttagaaaatatattagcagctgtgcttgcttgtattttagctggtgtacctattaaagcaattattgatagtttaactacattttcaggaatagagcatagattgcaatatgttggtactaatagaactaataaatattataatgattccaaagcaacaaacacgctagcaacacagtttgccttaaattcatttaatcaaccaatcatttggttatgtggtggtttggatcgagggaatgaatttgacgaactcattccttatatggaaaatgttcgcgcgatggttgtattcggacaaacgaaagctaagtttgctaaactaggtaatagtcaagggaaatcggtcattgaagcgaacaatgtcgaagacgctgttgataaagtacaagatattatagaaccaaatgatgttgtattattgtcacctgcttgtgcgagttgggatcaatatagtacttttgaagagcgtggagagaaatttattgaaagattccgtgcccatttaccatcttattaaagggtgtgagtattgatggatgataaaacgaagaacgatcaacaagaatcaaatgaagataaagatgaattagaattatttacgaggaatacatctaagaaaagacggcaaagaaaaagatcaaaggctacacatttttctaatcaaaataaagatgatacatctcaacaagctgattttgatgaagaaatttacttgataaataaagacttcaaaaaagaagaaagcaatgataaaaataatgattctgcttctagtcatgcgaatgataataatatcgatgattctacagactctaatattgaaaatgaggattatagatataatcaagaaattgacgaccaaaatgaatcgaatgtaatttcagtcgacaacgaacaacctcaatcagctcctaaagaacaaaatagcgactcgattgatgaggaaacagtaacgaaaaaagaacgaaaaagtaaagtaacacaattaaagccattaacacttgaagaaaagcggaagttaagacgtaagcgacaaaagcgaatccaatacagtgttattacaatattggtattgttgattgctgttatattaatttacatgttttcaccacttagtaaaattgcgcatgtaaatataaatggaaataatcacgttagtacttcaaagataaacaaagttttaggtgttaaaaatgattcaaggatgtatacgtttagtaaaaaaaatgctattaatgatctcgaagagaatccattaatcaaaagtgttgagatacacaagcaattaccaaacacattaaacgtagatatcacagaaaatgaaattattgctttagtgaaatataaaggtaaatatttacctttattagaaaatggtaaattgcttaaaggttcaaatgatgtcaaaattaatgatgcacctgtcatggatggtttcaaaggtacaaaagaagatgatatgattaaggcgttatctgaaatgacacctgaagttagacgatatattgccgaagtgacatacgccccaagtaaaaacaaacaaagcagaattgaattgtttacgacagatggacttcaagtaatcggtgatatttcgacgatatctaagaaaatgaaatattatccgcagatgtcacaatcattatcaagggatagttcgggtaaactaaaaacacgaggctatattgatttatcagtcggtgcttcatttatcccataccgtggaaacacgtctagtcaatcagaaagcgataaaaatgtgactaaatcatctcaagaggaaaatcaagcaaaagaagaattacaaagcgttttaaacaaaattaacaaacaatcaagtaagaataattaaaaaattttgatattgtctatgtttatagttcacaagccattcaacgtattgtaaactaaggatagtgtatttttttaatagtaatttgtcaggaggtgcctatctatggaagaacattactacgtaagtattgatattggatcatcaagcgtaaaaacaatagtaggcgagaaatttcacaatggtataaatgtgataggtacaggacaaacctacacgagcggtataaaaaatggtttaattgatgattttgatattgcgcgacaagcaatcaaagacacaattaaaaaggcatcaatcgcttcgggtgttgatattaaagaagttttcctgaaattacctatcattggaacggaagtttatgatgaatcaaatgaaatcgacttttatgaggatacagaaatcaacggttcacatatcgaaaaagtattagaaggtattagagaaaaaaatgatgtgcaagaaacagaagtaattaatgtgttcccgattcgttttatagtcgataaagaaaatgaggtttcagaccctaaagaattaattgccagacattcattaaaggttgaagcaggcgtaattgctattcaaaaatcgattttaattaatatgattaaatgcgtagaagcatgtggtgttgatgtattagatgtttactctgatgcatataactatggttcaatcctaacagctactgaaaaagagttaggtgcatgtgtcattgatattggtgaagacgttacgcaagttgctttttatgaacgcggtgaattagtagatgctgattctatcgaaatggcagggcgtgatattacagacgatattgcacaaggattaaacacttcttatgaaactgctgaaaaagttaaacaccaatatggtcatgcattctatgattctgcttcagatcaagatatcttcactgttgaacaggttgatagtgatgaaacagtacagtatactcaaaaagatttgagtgactttattgaagcgcgtgtagaagaaatattcttcgaagtatttgatgttttacaagatttaggattaacaaaagtaaatggtgggtttattgtaactggtggatctgcaaacttacttggcgtaaaagaattattatcagatatggtaagtgaaaaagttagaattcacacgccatcacaaatgggaattagaaaacctgaattttcttcagcaatttctacaatttctagtagtatcgcttttgatgagttattagattatgttacaattaattatcatgataatgaagaaactgaagaagatgttattgatgtgaaagacaaagataacgaatctaaattaggcggatttgattggtttaaacgtaaaacaaacaaaaaagatactcatgaaaatgaagtagagtcaacagatgaagaaatttatcaatcagaagataatcatcaggaacataaacagaatcatgaacatgttcaagacaaagataaagataaagaagaaagtaaattcaaaaaactaatgaaatctctatttgaatgattattggccaataaaactaggaggaaatttaaatgttagaatttgaacaaggatttaatcatttagcgactttaaaggtcattggtgtaggtggtggcggtaacaacgccgtaaaccgaatgattgaccacggaatgaataatgttgaatttatcgctatcaacacagacggtcaagctttaaacttatctaaagctgaatctaaaatccaaatcggtgaaaaattaacacgtggtttaggagcaggagctaatcctgaaatcggtaaaaaagctgcagaggaatctcgtgaacaaattgaagatgcaatccaaggtgcagacatggtatttgttacttctggtatgggtggcggaactggtactggtgcagcaccagtcgttgctaaaattgcaaaagaaatgggcgcattaactgttggtgttgtaactcgtccatttagttttgaaggacgtaaacgtcaaactcaagctgctgctggagtagaagctatgaaagctgcagtagatacattaatcgttataccaaatgaccgtttattagatatcgttgacaaatctacgccaatgatggaagcatttaaagaagctgacaacgtgttacgccaaggtgtacaaggtatctcagacttaatcgctgtttctggtgaagtaaacttagactttgcagacgttaagacaattatgtctaaccaaggttctgcattaatgggtattggtgtttcttctggtgaaaatagagcggtagaagctgctaaaaaagcaatctcttctccattacttgaaacatctatcgttggtgcacaaggtgtgcttatgaatattactggtggcgagtcattgtcattatttgaagcacaagaggctgctgatattgtccaagatgctgcagatgaagacgttaatatgattttcggtacagttattaatcctgaattacaagatgagattgttgtaacagttattgcaactggttttgatgacaaaccaacatcacatggtcgtaaatctggtagcactggattcggaacaagcgtaaatacttctagcaatgcaacttctaaagatgaatcattcacttcaaattcatcaaatgcacaagcaactgatagtgtaagtgaaagaacacatacaactaaagaagatgatattcctagcttcattagaaatagagaagaaagacgttcaagaagaacaagacgttaatcggttaatatatatacacaaataattcaacacaaatcatcagataacatatctgatgatttttttactaatttttagaacatgtagaaggacatttaagtttttcaaagttattaaaagtgtttaagtatcgtgtgaaaattaagtcaaaaattatttgcgcaacattttaactttaaacataaatgttatattatataattattaactttgtacagttagacgaagataatttaaatgaaatgatggtgacgatcgagtgaatgataattttaaaaagcaaccgcatcatttaatatatgaagagttattacaacaaggtattactctaggtattacaactagaggagatggtttaagtgactatcctaaaaatgcttttaatatggcgagatatattgatgatcgcccatataatattactcaacatcaattgcaattagctgaagaaattgcgtttgatagaaaaaattgggtgtttcccattcaaacacatgaaaataaagtcgcttgtattacaaaggatgatataggcacaaatatagacactttaactgatgcgcttcatggtattgatgcgatgtacacatatgatagtaatgtcttattaacgatgtgttatgcagactgtgtaccagtatatttttatagtacaaaacatcattttattgcattggcgcatgcaggttggcgtggtacctatactgaaattgtaaaagaagtgctaaaacatgtgaactttgatttgaaagacttacatgtcgttattggaccatctacatcatcaagttatgaaattaatgatgatattaaaaataaatttgaaacattgccaattgatagtgccaactatattgaaactagaggacgagatcgtcatggtattgatttgaaaaaagccaatgctgcattattaatttattatggtgttcctaaagaaaatatttatacgacagcgtatgctacatctgaacatttagaattatttttctcttatcgattagaaaaaggtcaaacaggacgcatgttagcattcattggtcaacagtaaacaaggaggagatatgtttgcgtgtgaaagataatttacaacaaatctcaacacaaattaatgacaaaagtgaaaaaaataatttttcaacaaaaccaaacgtgattgcagttacaaaatatgttacaatagagcgagctaaagaagcgtatgaggctggaataagacattttggtgagaatagattggaaggcttttttcaaaagaaagaagcattaccatcagatgcggtgatccattttataggatcattacaatctcgaaaagttaaggacgttataaacgacgtagattatttccatgctttagatcgattgagcttagccaaagaaattaacaaacgtgcagaacataaaattaaatgtttcttgcaagtgaacgtttcgggagaagcttctaaacatggtattgctttagaagatgttgatcagtttatagatgatcttaaaaaatatgacaaaatcgaaattgtaggtttaatgacgatggcaccattgacagatgatgaagcatatattagatcgttatttaaacagttacgtttgaaaaaagaagaaatacaacgactcaatttagaatatgcgccttgtgatgaattatcaatgggaatgagtaatgactatcttattgcagttgaagaaggtgcgacgtttgttagaattgggactaaacttgtaggagaagaggagtgagccacttggctttaaaagatttatttagtggattttttgtaatagatgatgaagaggaagtagaagtacctgacaaacaacaacaggtaaatgaagcgccagcaaaagagcagtcacaacaaacaacaaaacaaaacgcaatcaaatcagtccctcaaaaatctgcatcaagatatacaacaacgtcagaagaaaggaataaccgtatgtctaattattcaaaaaataattcacgtaatgttgtaactatgaacaatgctacaccaaacaatgcatcacaagaaagttcaaaaatgtgtttattcgaaccacgtgttttttcagatacacaagatattgctgatgagcttaaaaaccgccgtgcgacacttgtcaatttacaacgtattgataaagtatcagcgaaaagaattattgattttttaagcggtactgtttatgcaatcggtggagatatccaacgtgtaggtactgatattttcttatgtacgcctgataatgtggaagtagctggaagcattacagaccatattgaaaatatggaacattcattcgactaaggagttaacatatggatataaatgtgctagctacaatatttaaattcatcctttttgttgttgaaatttattatttcggcatgattatatatttctttacatcttgggtaccaagtattagagaaactaaggtaggttattttttagcgaaaatatatgaacctttcttacaaccatttagaaaagtaattccacctattggaattatcgacatatcatcaatcgctgcaattatcgttttagtattattccaaaaagggttactccaaatctttaattggattttaattcaattacaataaattaagcgacataacgaggcaagggtacatgatactttagcctcgtttttgatatgtatttttctgaatataagggcaatagatggtattttataatttttttaaggtagtgattaacatagatatttatcaacactttagacaggaagaatacgaattaattgatcagctaacggataaatgtgatcaagcggaacagcattatgcaccagtattaacgcattttttagatccaagagggcaatatatattggaagtgatttgtggcagttatgaagatttaaacgtatctttttatggtggacctaatgctgaaagaaaaagagcaatcatttcgccgaactattatgaacctaaagaaagcgactttgaattaactttaatggaaatagattatcctgaaaaattcgtcactttaaaacatcaacatattttagggacattaatgtctttaggtatcgaacgcgaacaagttggagatataattgtgaatgaacgaattcaatttgttttgacaagtagattggaatcatttattatgttagaattacaacgtattaaaggcgcatcagttaaactttatactattccagtaacagatatgatacaatctaatgagaattggaaaaatgaaagtgcaacagttagttctttaaggttagatgttgttattaaagaaatgatacgtaaatcacgtacgattgcgaaacaactaatcgaaaaaaaacgtgttaaagtgaatcacactattgttgattcagcagattttcaattacaagcaaatgatttaatatccatccaaggttttggtagagcacacattactgacttaggtggtaaaactaaaaaagataaaacgcacattacctatagaacattattcaaatagtaatgatttaaggaggataacaaatgccttttacaccaaatgaaattaagaataaagagttttcacgtgtaaagaatggtttagaacctactgaagttgctaattttttggagcaactaagcactgaaattgaacgtcttaaagaagataaaaaacaacttgaaaaagtaatcgaagagagagatactaatattaagtcttatcaagacgtgcatcaatctgtaagtgatgctttgatacaagctcaaaaagctggtgaagaaactaagcaagctgcagagaaacaagctgaagcgattatagctaaggcagaagcgcaagctaatcaaatggttggtgacgcggtagaaaaagcacgccgtttagcattccagactgaagatatgaaacgtcaatcaaaagtatttagatcgcgtttccgtatgttagttgaagcgcaattagacttattaaaaaacgaagattgggattacttgttgaattatgatttagacgctgaacaagtgacgcttgaaaatattcatcatttgcatgaaaatgatttaaagccagatgaagttgcagcaaatgcacaaaataatgcatcaaatacaccagacaataatcaacaatccaatgattcagaaacaactaagaagtaagaattaaataaagacagacgcgtaatatacatttaacttttcacagcgaattaggtaatggtgagagcctagtaaaagcatgtatgttatatcactggctttttaatatttaaataatgtaatgagagaactctaagttgagttaataagggtggtaccgcgagcaatcgtcccttttaatttaacttagagttttttaaatttttaaggagtgaaaaaaatggattacaaagaaacgttattaatgcctaaaacagatttcccaatgcgaggtggtttaccaaacaaggaaccgcaaattcaagaaaaatgggatgcagaagatcaataccataaagcgttagaaaaaaataaaggtaacgaaacattcattttacatgatggcccaccatacgcgaatggtaacttacatatgggacatgccttgaacaaaattttaaaagactttattgtacgttataaaactatgcaagggttctatgcaccatacgtaccaggttgggatacacatggtttaccaattgaacaagcattaacgaaaaaaggtgttgaccgaaagaaaatgtcaacagctgaattccgtgagaaatgtaaagaatttgctttagaacaaattgaattacagaaaaaagattttagacgtttaggtgttcgtggtgactttaatgatccatatattacattaaaacctgaatacgaagctgcacaaattcgtatttttggagaaatggcagataaaggtttaatttataaaggtaaaaagccagtttattggtctccttcaagtgagtcttcattagcagaagcagaaattgaatatcacgataaacgttcagcatcaatttacgttgcatttgacgttaaagatgacaaaggtgtcgttgatgcagatgctaaatttattatctggacaacaacgccatggacaattccatcaaatgttgcgattaccgttcatcctgaattaaaatatggtcaatacaatgtaaatggcgaaaaatatattattgcagaagccttgtctgacgctgtagcagaagcactggattgggataaagcatcaatcaaattagaaaaagaatacacaggtaaagaattagagtatgttgtagcacaacatccattcttagacagagaatcgttagtgattaatggtgatcatgttactacagatgctggtacaggttgtgtacatacagcaccaggtcacggggaagatgactatattgttggtcaaaaatatgaattgccagtaattagtccaatcgatgataaaggtgtatttactgaagaaggcggccaatttgaagggatgttctatgataaagctaataaagccgttactgatttattaacagaaaaaggtgcactattaaaattagactttattacacatagctatccacacgactggagaacaaaaaaacctgtaatcttccgtgctacaccacaatggtttgcctcaatcagtaaagtaagacaagatattttagatgcaatcgaaaatacaaacttcaaagtaaattggggtaaaacacgtatttacaatatggttcgtgaccgtggcgaatgggttatttctcgtcaacgtgtgtggggtgtaccgttaccagtattttatgctgaaaatggcgaaattatcatgacgaaagaaacagtgaatcatgttgctgatttatttgcagaacacggttcaaatatttggtttgaaagagaagcgaaagacttactaccagaaggatttacacatccaggcagccctaacggtacatttactaaagaaacagacattatggacgtttggtttgattctggttcatcacaccgtggcgtgttggaaacaagaccggaattaagtttcccagcggatatgtatttagaaggtagtgaccaatatcgtggttggttcaactcttctatcacaacttcagttgctacaagaggagtatcaccttataaattcttactttctcatggttttgttatggacggtgaaggtaagaaaatgagtaaatctttaggtaatgtgattgtacctgaccaagtggttaaacaaaaaggtgctgatattgcgagactttgggtaagtagtacggactatttagctgatgttagaatttctgatgaaattttaaaacaaacatctgatgtttatcgtaaaatcagaaatacattaagatttatgttaggtaacattaacgatttcaatcctgacacagatagcattcctgaatcagagttattagaagtggatcgttacttgctaaatcgtttacgtgaatttactgcaagtacgattaacaactatgaaaactttgactacttaaatatttatcaagaagttcaaaactttatcaatgttgagttaagtaatttctatttggattacggtaaagatattttatatattgaacaacgtgattctcatatccgtcgtagtatgcaaacagtgttatatcaaattttagttgatatgacgaagttgttagcaccaatcttagtgcatacagctgaagaagtttggtctcatacaccacatgttaaagaagaaagtgttcacttagcagacatgcctaaagttgtagaagtagatcaagctttattggataaatggcgtacatttatgaatttacgtgatgatgtgaaccgtgcattagaaactgctcgtaatgaaaaagttattggtaaatcattagaagctaaagttacgattgctagtaacgataaatttaatgcatctgaattcttaacttcatttgatgcattacatcaattatttatcgtgtcacaagttaaagttgtagataagttagacgatcaggcaacagcttatgaacatggtgatattgtcatcgaacatgcagatggtgaaaaatgtgaaagatgttggaactattcagaggatcttggtgctgttgatgaattgacgcatctatgtccacgatgccaacaagttgtaaaatcacttgtataattgaaattgtataaagtactcatacagatgatataaattaaagctctcttcataatcatgttgtagtttttgttgacatgatgaagagagtttttttgtgaataaaaaaatgaccaagttaccggtcatatatgtaaaaaatgtgcgatttactaaaataaaaattattcaggaatggtacaaattatctgaggcatataaatgcgttatagttgctattctcaattatgttcgcgataattttaagtaaaagtaagcacagatattgaatttgataggagttaattgaatgtatcataacagtaacgcaaactttgtcaatggtatcactttaaatgtgagagataagaatgaattaaagccattttatgaggacatattaggattaaatattataaatgagacattaacatcgatacaatatgaagtaggtcaaaataatcatgtcattacacttgttgaattacaaaatggacgtgaacctttaatgtccgaagcgggactgtttcatatcgcaattaaactacctcaaattagtgatttagctaatttactaattcatttaagcgaatatgatattccagttaacggaggtatacagcctgcttcgttatcattattttttgaagacccggaaggaaacggttttaaattttatgttgataaagacgaagcgcaatggacgaggcaaaataatttagtaaaaattgatattagaccattaaatgtaccgagattagtgagtcatgcaacaaaattgttatggttaggtattccagatgacgctattataggtgcattgcatattaagacaattcatttatcagaggtaaaagagtactacctcgattattttggattagagcaatcggcatatatggatgattattcaatatttttagcatcgaatggctattatcaacatttggccatgaatgattgggtatcagcaacgaaacgtgtagaaaattttgatacgtatggattagcaattgttgactttcattatcctgaaacaacacatttaaatttacaaggtccggatggtatctattatcgctttaatcatatcgaagttgaagattagtatatactttgaatggacgaaccatataatgaatcgtttttaatgatctttttatacaagttatgaaggaggctgggacattaagttcttaggcaatgtaaaaagctgatttctattaattatttgatagaaatcagcttttttgatatgtattttataatgtacagctcgttgagctgctattttccttatattaattgccattaatacaaaacctagctctcgtttaactttatttattcctcgaactgacattcgagtgaaactcaaaatagcctactttcttaaattaacaatatctattctcatagaatttgtccaattaagtgtagacgattcatgtcttatttttttaaagtatttaaaagtaaaattacatgttaatacgtagtattaatggcgagactcctgagggagcagtgccagtcgaagaccgaggctgagacggcaccctaggaagggacccatcatcaaaaattctatttatagaattttacagtaatgtgccagatgggcatagcgaagccattcaatacgaagtattgtataaatagagaacagcagtaagataatttttaattagaaaatatcttactactgtctttttagggatttatgttccagcctgctttcctaatttttaatgtcatcttaaatatgataaatgaataattaagttcatatttaatgtcaaaacatagtagtttatcaagtattgagttagtaacattagatttaatgtaatatgcttactttttttattagcaggtgtaagctataatataaagagttgtctcatggacgattgattggaggaacgaaaatgcacaaaaaatattttattggcacttccattttaatagcagtatttgtcgttatatttgaccaagttactaaatatattatagctactacaatgaaaattggagattcatttgaagtgataccgcactttttaaacataacatcacatcgaaataatggtgctgcatggggaatattgagtggaaaaatgacatttttctttattattaccattattatattaatagccttagtatatttctttattaaagatgctcaatataatttgtttatgcaagttgctattagtttactttttgcaggtgcacttggaaactttattgatagaattttaacaggagaagttgttgactttattgatacaaatatttttggttatgattttccaatatttaatatcgcagattcaagtttaacaattggtgtaatattaattattattgccttattaaaggatacttccaataaaaaggagaaggaggttaagtaatggagacttatgaatttaacattacagataaagaacaaacaggtatgcgtgtagataagttgctgcctgaattaaataatgattggtctcgtaaccagatacaagattggattaaagcaggtttagtcgttgcaaacgataaagttgttaaatctaattataaagtgaaacttaatgatcatatagttgtcactgaaaaagaagtggttgaagctgatattctacctgaaaatttaaatttagatatttattatgaagatgacgatgttgcagttgtatataaaccgaaaggcatggtagttcatccatcaccagggcattataccaatacattagttaatggtttaatgtatcaaattaaaaatttgtcaggtattaatggagaaattcgtccaggtattgttcaccgtatagatatggatacttctggtttattaatggttgctaaaaatgatattgctcatcgtgggcttgtagaacaattaatggataaatctgttaaaagaaaatatatcgctttagttcacgggaatattcctcatgattacggtacaatcgatgcgccaattggtagaaacaaaaatgatcgtcaatctatggctgttgttgatgatggtaaggaagcagtgacacattttaacgtactagaacattttaaagattatacgcttgttgaatgtcaacttgaaacaggacgtacgcatcaaatccgtgttcacatgaaatatattggcttcccattagttggtgatccaaagtatggaccgaaaaagacattggatattggtggtcaagctctacatgctggacttattggattcgaacatccagtaacaggtgaatatattgaaagacatgctgaattaccacaagactttgaagatttattagatacaattcgaaaaagagatgcataattgtgtcgtgctataattacgataacattattatgtaaactataagtgtttatcgttttcgttttttttaaatgaaaacacattataaaatagattaaggttaacatttttactgagtatggttaatttttcaatatagattgacaaagcgcctgattagtattatccttataacagtttaagtacaacataaagagtctttaattgagcgtccagagagacgtcaaagacatgaaaatatagatatatactaaaatgatcataacactttcacatatgcaagaataagtagtaatactacgattcttctatgtaaataggctgattgtatatactaaacctcatgtcgatattaaagacatgaggttttttgtttctaaattttgaaagggtgagaatatgtctgaacgtatcataatggatgatgccgcaatacaacgtacagtgacgagaatcgctcacgaaattttggagtataacaaaggtactgataatttaattcttttaggtatcaaaacaagaggtgaatatttagcgaatcgtatacaagataaaattcatcaaattgagcaacaacgtatacctactggaacaattgatattacatactttagagatgatatagagcacatgtcatcacttacgacaaaagacgcaatagacatcgacacagatattacagataaagtagtcatcattattgacgatgtgctgtatactggtcgaacggttcgtgcttcacttgatgctattttgctaaatgctagacctattaaaattggtttagctgctttggttgatcgaggacatcgtgagttaccaattcgagcagattttgttggtaaaaatatacctacttctaaagaggaaacggtaagtgtctatttagaagaaatggatcaaagaaatgcagttataattaaataataccccttttaattcagtacgagagactgaaaaaggtgggggagttgaatgataaataagttttcatatgcttgtttatctaataataccctcatgttcgacaactataagtcaatttctatggacgaaaatgacttgtagcaacttgtcacactttttgtctctttacatatactgatgtaaagagatttttttattatcggaggaaatgaatattatgcaaaatgatgaaatgtttgaacgaacagtaaaacccgtactagatgtaaatgaaaaaccacaaccagcgcaatgggcatttttaagcttacaacatttatttgcgatgtttggcgcaacagtactagtaccattcttaacaggactaccaatatcagcagcgttactagcttcgggaatcggtacattactttatatcttaataacgaaggcgcaaataccagcatacttgggatctagctttgcatttatcacgccaattatcacgggattaagtacgcatagcttaggagacatgcttgtagcattattcatgagtggtgttatgtacgtcatcatcgggattctaatcaaattaagtgggacagcatggttaatgaaattattaccaccagttgttgttggaccagtcatcatggtaattggtttaagcttagcgcctactgcagtcaatatggcaatgtatgaaaatcctggagatatgaaaggttacaatatcagtttcttaattgttgcaatgataaccttgcttgtaacaatagtcgttcaaggattttttaaaggattcctatctttaattccagttcttgtaggtattatcgtaggttatgtggtagcgatttttatggggattgtgaaatttgatgcaattatgtcagcaaaatggatagatttccctcatatttatctgccatttaaagattatgtaccttcatttcacttaggacttgtacttgtaatgattccgattgtgttcgtaacagtaagtgaacatattgggcaccaaatggtattgaataaaatcgtaggtagaaacttctttgaaaagccaggacttgataaatcaatcattggtgatggtgtttctacaatgtttgccagtattattggtggaccaccaagtacaacatacggtgaaaatatcggtgtattagcgattaccagaatatacagtatttacgtcattggtggtgcagcagttatagcaattgttttagcattcattggtaagttcactgcattaatttcttctatacctacaccagttatgggaggagtatctatattacttttcggtattattgcagcaagtggcttaagaatgttagttgaaagcaaagtagattttgcgaacaatcgaaatttagttatagcttctgtaattttagttgtaggtatcggtaatttagtatttaacttaaaagaaattggtatcaaccttcaaattgaggggatggcattagctgcactttcaggaattattttgaacttaatcttacctaaagagaaaaaacaaaacaattaagatttacaaattaaggagggcgcttttatgaatcatttattatcaatggaacatttatctacagatcaaatatacaaacttatccaaaaggcaagtcaatttaaatctggtgaacgtcaactaccaaactttgaagggaaatatgtcgcaaatttattctttgaaaattctactcgaacaaaatgtagttttgaaatggcagaacttaagctagggttaaaaacgattagctttgaaacatcaacatcatctgtttcaaaaggtgaatctttatatgacacatgtaaaactttagaaagtattggctgtgatttattagtcattagacatccgtttaataactactatgaaaaattagcgaatattaacaccccaattgcgaatgctggtgatggtagtggacaacatccaacacaaagtttacttgatttaatgacgatatatgaagaatatggatattttgaaggcttgaatgtattgatttgtggagacattaaaaattcacgtgtcgcacgtagtaattaccatagtttaaaagcattaggtgcaaacgtaatgtttaatagcccaaatgcttggattgataattctttagaagcaccttatgtaaatatagatgatgttatagaaacagtagatatagttatgttattaagaattcaacatgaaaggcatgggcttgcagaagaaactagatttgcagcagatgattatcatcaaaagcatggcttaaatgaagtacgctataacaaattacaagaacatgctattgttatgcatccggcacctgtgaatagaggagtagaaatacaaagcgatttagtagaagcttcaaaatcaagaatttttaagcaaatggaaaatggcgtttacttaagaatggcagtcattgatgaattattaaaataggtaaggggacgaaaatgatgaaattaattaaaaacggtaaagtattacaaaatggcgaattacaacaagcagatattttaattgatggtaaggtaattaaacaaattgcacctgcaattgaaccaagcaatggtgttgacatcatagatgcgaaaggtcactttgtgtcacctggatttgtcgatgttcatgttcatttacgtgaacctggtggtgaatataaagagacaattgaaactggtactaaagctgctgctagaggcggatttacaactgtatgtccaatgcctaacacaagaccggtaccagattctgtagaacattttgaagctttacaaaaattaatcgatgacaatgctcaagtacgtgtattaccttatgcttcaattacaacacgtcaattaggtaaagaattggttgatttcccagcactagtaaaagaaggtgcctttgcgtttacagatgacggtgtaggagtacaaactgcaagcatgatgtatgaaggcatgattgaagctgcaaaagtaaacaaagccatcgtagcacactgtgaagataattcattaatctatggtggtgcaatgcatgaagggaaacgcagtaaagagttaggtataccaggtattccaaacatttgtgaatctgttcaaatcgcaagagatgtactattagctgaagcagcaggttgtcattatcatgtatgtcatgtttctactaaagaaagtgttagagtcattcgtgacgctaaacgcgcaggcattcatgttacagctgaagttacaccacaccatttattgttaacagaagatgatattcctggtaataatgccatttataaaatgaatccaccattgagaagtactgaagatagagaggctttgttagaagggttactagacggtacaattgactgtatcgcaacagaccatgcaccacatgcacgtgatgaaaaagcacaaccaatggaaaaagcaccattcggaattgttggtagtgaaacagcattcccattattatatacgcattttgtaaaaaatggtgattggacattacaacaattagtagattacttaacaattaaaccatgtgagacatttaatttaggatacggcacattaaaagaaaatggttatgcagatttaacaatcattgatttagatagtgaacaagaaattaaaggagaagatttcttatcaaaagcagataatacaccatttatcggctataaagtttatggaaatccgatcttaacaatggttgaaggcgaagttaaatttgagggggataaataatatgcaaagcaaacgttatctagtgttagaagacggttctttttacgaaggctaccgtttaggatctgataacttaactgtaggagaaattgtatttaatacagcgatgacaggttatcaagaaactatttcagatccatcatatacaggtcagatcattacttttacgtatccattaatcggtaattatggtatcaatagagacgattttgaatcattagtacctacattaaacggtattgtagtgaaagaagcgagtgcgcatccaagtaattttagacagcaaaagacacttcatgacgttttagaattgcatcaaattccagggattgcaggtgttgatacaagaagtattacgcgtaaaattcgacaacacggtgtgttaaaagctggttttactgatcgaaaagaagatattgatcaacttgtcaaacatttacaacaagtagaattacctaaaaacgaagtagaaatcgtttcgactaaaacaccgtatgtttcgacaggtaaggatctaagtgtcgtacttgtagactttggtaagaagcaaaatattgttcgagaattaaacgtcagaggttgtaacgtcacagttgtaccatatacaactactgccgaagaaattttagcaatggctccagatggcgttatgctatcaaacggaccaggtaatcctgaagttgtagaatgtgcgattccaatgattcaaggaattttagggaaaattccgttctttggtatctgtctaggacatcaactttttgcattatctcaaggagcaagctcatttaaaatgaagtttggtcatcgtggtgcgaaccatccagttaaaaatttagagactggaaaagttgatattacgagtcaaaaccatggatatgcaatagatatagattcgttaaaaagtactgatttagaagttactcatcttgcattaaatgatggtactgtagaaggtttaaaacataaaacattaccagcattttctgttcaataccatcctgaagcaaatccaggaccgtcagattcaaactatctatttgatgattttgtagcaatgatgactaattttaaggaaaaggagcgtcatatcaatgcctaaacgtaatgatatcaaaacaattttagtaatagggtctgggccaattatcataggtcaagcagctgaatttgattatgctggaacacaagcatgtctagctttaaaagaagagggatatcgagttattcttgtaaattcaaatccagcgacaatcatgactgataaggaaattgcggataaagtatatatcgaaccgttaactcatgattttatagcgcgaattatacgtaaagagcaacctgacgctttacttccaactttaggtggtcaaacaggtttaaacatggcgattcaactacacgaaagtggtgtgcttcaagataataacgtccaattattaggaactgagctaacatcaattcaacaagcagaagaccgtgaaatgtttagaacattaatgaatgatttaaacgttcctgtaccagagagtgacattgtaaatacagtagagcaagcctttaaattcaaagagcaagtgggatacccgctaattgttagaccggcatttacgatgggtggtaccggaggcggtatttgtcataatgatgaagaattacatgaaatcgtctcaaatggtcttcattatagtccagcaacgcaatgtttattagaaaaatctatcgcaggttttaaagaaatcgaatacgaagtaatgcgtgataaaaacgataatgccatcgttgtatgtaacatggaaaatattgatccagttggtattcatacaggcgattcaattgttgtggctcctagtcaaacattatcagatgttgagtatcaaatgttacgtgatgtttcattaaaagttattcgagctttaggtatcgaaggtggttgtaatgttcaattagcattagatccccattcattcgattattatattatagaagtaaatccgcgtgtatcacgttcatcagcgttagcttcaaaagcaacaggatatcctattgcaaaattagctgctaaaatcgcggttggtctaacattagatgaaatgttaaatccaattacaggaacatcttatgcagcgtttgaaccaactttagactatgtgatttcaaaaataccaagatttccttttgataaatttgaaaaaggagaacgagagcttggcacacaaatgaaagcaacaggtgaagttatggccattggtcgaacttacgaagaatcattgttaaaagcaattcgatcacttgagtatggtgtgcatcacttaggattaccaaatggtgaaagcttcgatcttgattatattaaagaacgtatttcacaccaagatgatgaacgattatttttcatcggcgaagcaattagaagaggcacaacattagaagaaattcataatatgactcagattgattacttcttcttacacaagttccaaaacattattgatattgagcatcaattaaaagagcatcaaggtgatttagaatatcttaaatatgcaaaagattatggatttagtgataaaacaatagcgcatcgctttaatatgacggaagaagaagtatatcaattgcgtatggaaaatgatattaaacctgtttacaagatggttgatacttgcgcagctgaatttgaatcttcaacaccatattattatggtacatacgaaactgaaaatgaatccatagttactgacaaagaaaaaatcttagtattaggctctggaccaattcgaatcggccaaggtgtagaatttgactatgcgacagttcacgccgtttgggcaattcaaaaagcagggtacgaagcgataattgtgaataacaatccagaaacagtttcaacagacttctcaatttctgacaaattatactttgaacctttaactgaagaagatgtgatgaatatcattaatttagaaaaacctaaaggtgtcgttgtacaatttggaggacaaacagcgattaatttagcagacaaattggctaaacatggtgttaaaatacttggtacttcactagaaaatctaaatcgtgctgaagatagaaaagaatttgaagcactattaagaaaaattaacgtgccacagccacaagggaaaacagctacatcacctgaggaagcattagcgaatgctgcagaaatcggatatccggttgtagtaagaccttcttatgtattaggtggtcgcgcaatggaaattgtagacaatgacaaagagttagaaaactatatgacccaggctgtaaaagcgagtccggaacatccggtactagtcgatagatatttaactggtaaagaaattgaagttgatgcgatttgtgatggagaaacggtcattattccaggaatcatggaacatattgaacgtgctggtgtgcatagtggtgactcaatcgctgtatatccaccacaaactttgacagaagacgagttagcaacacttgaggactatactataaaattagctaaaggtttaaacatcattggcttaatcaacattcaattcgttatagctcacgatggtgtgtatgttttagaagtaaatccacgttctagtagaacggtaccattcttaagtaaaattactgatattccaatggcacaattagctatgcgagcaatcattggggaaaaactaacagatatgggttatcaagaaggggttcaaccatatgctgagggtgtctttgtgaaagcaccagtatttagttttaataaattgaaaaatgttgatattactttaggacctgaaatgaagtcaacaggtgaagtgatggggaaagatactacattagaaaaggcgttattcaaagggttaacaggtagtggcgttgaagttaaagatcacggtacagtattaatgaccgtcagtgacaaagataaagaggaagttgttaaattggcacaacgcttaaatgaagttggctataaaattttagcaacgtctggaacagctaataaattagctgagtatgacatacctgcagaagtagtaggcaaaattggtggcgaaaatgatttattaacacgtattcaaaatggtgatgttcaaatcgttataaatacaatgactaaaggtaaagaagtagaaagggatggcttccaaattagacgtactacagttgaaaatggtattccatgtttgacatctttagatacagctaatgccttaacgaatgtaattgaaagtatgacatttacaatgcgtcaaatgtaaatcaatcaaactgtatcggtggggctgtaattaaccatttacttaaagaagtttatattacagcctcattattttaatgaatttcttaatataaagggagacatatatgatgaaagatttaccaattattgcattagattttgaatcaaaagaaaaagtaaatcaatttttagatttatttgatgaatcattattcgtaaaagtaggtatggaacttttttatcaagaaggtcctcaattaattaatgagataaaagaaagaggccatgatgtatttttagatttaaaactgcatgatattcctaatacagttggtaaggcgatggaaggactagctaaattgaatgttgatctggtaaatgttcatgctgctggtggcgtaaaaatgatgtctgaggccattaaaggattaagaaaacataatcaagatacaaaaattattgcagtaacacagcttacgtcaacaacagaagacatgttacgacacgaacaaaatatacaaacatcgattgaagaggccgttttaaattatgccaagttagcaaatgcagctggtttagatggcgttgtttgttcacctcttgaaagtcgtatgttgactgaaaagttaggtacatcatttttaaaagtaacaccaggtattagacctaaaggtgcatctcaaaatgaccaacaccgtattacgacaccggaagaagcaagacagcttggttcgacgcatattgtagtcggtagaccgattacacaaagtgacaatccagtcgaaagttatcataaaattaaagaaagttggttagtataatggctaaagaaattgcaaaatcattattagatattgaagctgtaacattatcaccaaatgatttatatacatggagttcaggtattaaatcaccgatttactgtgataaccgtgttacgttaggttatcctttagttcgaggcgcaatccgcgatggtttaattaacttaattaaagaacactttcctgaagtagaagttatttctggtactgcaacagctggtattccacatgcagcttttattgctgaaaaattaaaattaccaatgaattatgttcgttcatcaaataagagtcatggtaagcaaaatcaaatcgaaggtgctaaaagtgaaggtaaaaaagtagttgtgatagaagatttaatttcgacagggggatcttcagtcacagcagttgaagccttaaaactagcaggtgcagaagtattaggtgttgtagctatctttacttacggtttgaaaaaagcagatgatacatttagcaatattcaactacctttttacactttaagtgattacaatgaattaattgaagtagctgaaaatgaaggtaaaatttctagtgaagatatccaaacattagttgaatggagagacaacttagcataatatagacactagaaggaggaattcaacaaatgaatgacaaaacatctaatgatttatatgggaagataaaacattgtaacgaatttatcaatcattcaaatgattccaatctatctagtagtcacgatgtcgacgaaagttcaacgaagcaaaaacatataaaaaataaaacaactatagatcataatgatgatttatttaaacatgtaaaggatatattacgtaaacaagaacaaatttaaaaacaaaaaagctatagtgtttaatatcaggggctgcttaaccgcatccgaatattacaaacactatagcttttattatataaaaaatttattagcggataattaactttattaaaatccaaccaattaagaatacgagtaataggactaatactggaatcacataatgtaacataacgtccctcctttaacttaattttaattgtaatcaaatttgacaataagtcaaaacattaatacctatgataagtatcatttattaacatatgtatcatatttttaatcttgcgtaatttttatcgttaactatgtgatttaatcaacaggccaataagacgtttgtcattcgtgcacataacggtacgacgcgcttttgtcattttaattatgttaagataatagtagttatagaagttcaatctataggaggcatagcatggatattccaaaaatcacgacatttttaatgtttaataaccaagctgaagaagctgttaaactatacacaagcttatttgaagatagtgagattataacaatggctaagtatggtgaaaatggacctggtgatcccgggactgtacaacactcaatatttacattaaatggacaagtattcatggcgattgatgctaatagtggcacagaattaccaatgaatcctgcgatttcattatttgttacagtaaaagatactattgaaatggaacgactatttaatggattaaaagatgaaggtgccattttaatgccaaaaacgaatatgccaccatacagagagtttgcttgggttcaagataagtttggagtaagttttcaattagcattacctgagtaaaaggattcgcacagcgttgaatgataaagaaacactttttcttatgcatgcgttttacctatgtatttctattttaagtacacattagcattttagtttcactcatttttaaaatcacaaagataatttgtaacttaaatgatgatacgttatttaaaaacacgatacttcgtttcaatgaacgcattaaataataaataaacacctcaccataagaaaggactactttcttttgtgaggtgtttatttgtcgacaacttgattatgattgtttcattttttgaataagttcataatcaggtgtagcatacaaagttttttgattgtcatatgttacaaacccaggctttgcacctgatggtttatgcacatttttaattaatgtataatcaacaggtatttgtccagaattaccagcttttgaaaagtatcctgctaacatagccgcttccttgattgtcgtatcacttggtgcatcattaaatataacgacatgtgaaccaggaatatcttttgtgtgtaaccatgtgtgagtttttttagcttttttatttgttaaataatcattttgcttgttattcttaccaacatatatatcgtcgccatcagttgatacataatgttgtaattgaatctgcgctttctttttcttagtttgatttttacgctgtttcataaagccttgttctgctaattcatctctaatttcatcaatgtcatggacagaaatatgatgtaattgttgttcgattgttgaaaaataatctatattgtctttcgtcaattgaatttgatgttgtaattcacgttctctcgttttcatacgattatattgtttataataatattgagcatttgctgatggggattttgtaggatttaaaggaatgacaacttcttcattcgtataataattcaatgccgtcacttctttatcgccttgcttaattcgatatatattagcagtgatcaattcaccatataactgttcagtatctttatttttagactgctcatattcttcaatcaacttcgctaatttattttgatatttgtacaactgctgttgaacaaatcgaactaaatcattcgcacgttgtttaacgcgttcacgttcgccacgcgcatcataaaaacgatcaagcaaatcatttaatgaatcgtatgtaactgtatcatcattaaattgatttaactttataaaatagaaatcctctttacctgtttcatgatttttatgaaaaataggagtaggtggtaacttggtttctgccattacttcgtcaaatgcttctggtaatgttgatgaagtaataaattgacgacgactaacgatttcattcgtaattaaagggctaaatccttcaaactgattcaataattgtttagcaatattacctgcgttaaaatcgatatatttcaacacctctgcacctgtaatatcatacggatttattttgtgctgagtaggtggtgcttcataattaaatcctggcattactgtacgatagtgattcgtatttggtgttaagtgtttaaatccttcaattattttgcgattttcatctactaaaattaagttactatgtttacccataatctcaaggatgacagtgcggtaaatagtatcgccaatttcatctttactctttatatcgatttcaatgcgacgatcattaccaatttgcttaatcgattcgataataccaccttctaagtgttttctaaaaacacgcgcaaacatgggtggattaaatggattatcatattttttagtagtcaattgtaatcttgaaaagtttggatggattgacaataacaattgatggttttgtctattttgacgtacaaccattagtatcgtgtcattatcaggttgattgattttgtgaacgcgtcctgttgttaaaaattgtagagactcaaccattttctttgtaaataagccatcataagccataatttatcttccaccttcttcatatcattcgtttcattttaacatgattgtaacttttcagtatagttattgaaccatacattatgccatacattttacattatctaaaagtttgcaattcaatttatttaattaaaattaatcgtgcaatataacgatattgttagacttaatagaaattatggcatgcaatttcaaatatgctatacaatataaagaacaatgtgatatcatatttaaataatagaagattagcttagagaggtcgtaaggcatggataatgaaaaaggattgttaatcgttttatcaggaccatctggagtaggtaaaggtactgttagaaaacgaatatttgaagatccaagtacatcatataagtattctatttcaatgacaacacgtcaaatgcgtgaaggtgaagttgatggcgtagattacttttttaaaactagggatgcgtttgaagctttaatcaaagatgaccaatttatagaatatgctgaatatgtaggcaactattatggtacaccagttcaatatgttaaagatacaatggacgaaggtcatgatgtatttttagaaattgaagtagaaggtgcaaagcaagttagaaagaaatttccagatgcgctatttattttcttagcacctccaagtttagaacacttgagagagcgattagtaggtagaggaacagaatctgatgagaaaatacaaagtcgtattaacgaagcgcgtaaagaagttgaaatgatgaatttatacgattacgttgtagttaatgatgaagtagaacttgcgaagaatagaattcaatgtattgtagaagctgagcacttaaaaagagagcgcgtagaagctaagtatagaaaaatgattttggaggctaaaaaataatgttaaatccacctttaaaccaattaacgtcacaaattaaatcaaagtatttaattgcaacaactgcagcgaaaagagcgcgtgaaattgatgaacaacctgaaactgaattattaagtgaatatcattcatttaaaccagttggtagagcgttagaagaaattgctgacggtaaaattcgccctgttatttcaagtgattattatggtaaagaatagtttcgaccattaaaaatatgtgaagctagacgtacatcaaatacgtcaaggcatatccaaatcaaacgcacctatgtaggtgtgtttttttagtttatccaatgattgatgttataataatactaaatttgtatctataaaaaagtaatgagcatttgtgcgcatatgatgatgtaaagcgtaaatgtcatagtgatatttaagggagattgaatatgaagaaaatattattagccgttacaggtggcattgcggcatataaagcaattgatttgacaagtaagttaacacaatctgggtatgaagttcgcgttatgttaacgaatcacgcacaaaaatttgtgacaccattagcatttcaagcaataagtcgaaatgctgtttatacagatacttttatagaagaaaatccttcagaaatacagcatattgcattaggtgattgggcagatgcaatcattgttgcacctgcaacggcaaatacaattgcaaaattgagtgtaggtattgctgatgatttggtgacatcaacgttgctagcaacagagacaccgaaatttattgcgcctgctatgaatgtgcatatgtatgaaaataaacgtacgcagcaaaatattaatattttaaaagaagatgggtatcattttatcgaaccaggaagcggatttctagcatgtggttatgttgctaaaggacgtatggaagaaccgcttcaaatcgtttctgtaattgatgctcattttcaaaatagtaatcgtttagctaatagttcatttcaagataaacgcgcattggttacagcaggaccaactattgaagttatcgatccagtcagatttgtatccaatcgttcttctggaaaaatgggctatgcaatagctgaagcattgcgaaatcgaggagctatcgtgacgttagttgctggtcctacaacactagaggatccaaaagatattgaagttattcatgttcaaagtgctgaagaaatgtttgaacaagtgacaagccgatttgacgaacaagatattgttgtaaaagcagcagccgtatctgactatacaccggttgatgtattagaacataagatgaaaaagcaggatggtgatttgtcagtatcttttaaacgtactaaagacattcttaaatatttaggtgaacataaaacatcacagtatttaataggctttgcagcagagactgaagatattgaaaattatgcacaacaaaaattacgcaagaaaaatgcagatgtgattatttcaaataatgttggggatatgtctatcggatttagttctgatgataatgaattgacaatgcattttaaaaataatgaaaaagtaaatatcaagaaaggaaaaaaagtagtattagctgcacaaattttagatgaactagaaactaggtggcaataatgatagcgaaagtcatagtcgatgtcgcgtcgaagagcgttgactataaatttgattatataattcccgaacaactcgaatctgtcatccaacctggtgtgcgtgtaattgtaccttttggaccaagaacgattcaaggttatgtaatggaagtaacagcagaacctgatgcacaacttgacgtttcgaagttaaaaaaaatcatagaagtgaaagatatacaaccagaattaacatcagaattaatagctttaagtgagtggatgggttcaactcatgtcattaaacgtatttctatgctagaagtgatgcttccgagtgctattaaagcgaagtataaaaaagcatttaagatgaaagatgacatagagctaccttcagctttattacaaaaatttgataagcatggttactattattataaagatgcgcaaaaaaataatgatattcaattgcttatgaagttgttaaaagatgatatcgttgaagaaaaaacgattctcacacaaaatataactaaaaaaaccaagcgtgctgttcgtgtcattgaagggtatcatcctgatgaagtattagctaagttggagaaagttattaaacaatacgatttgtatgcttacttgtctgaagaacaacataaaacaatatttttaactgatattgaggatatgggcttttcaaaatccagtttagatggacttatcaaaaaaggttatgttgaaaaatatgacgcggttgttgaaagagacccatttaaagatcgtgttttcgaacaagaatcaaaacagcaattaacagaagaccaatataaagcatatgaagcgattaaagctaaaattgtaagccaagagcaagaaacatttttacttcatggtgtgacgggatcaggtaaaacagaagtatatttacaaacgatagaagatgttttaagccaaggaaaacaggcgatgatgttagttcctgaaatcgctctaacaccgcaaatggttttacgcttcaaacgtcgatttggtgatgacgttgctgtattacattctggcttatctaatggggaacgttatgatgaatggcaaaaaattagggatggtcgtgcgagagtaagtgttggtgcaaggtcaagtgtgttcgcacctttcaaaaatttagggttaatcatcattgatgaagaacatgaatctacatataaacaagaagattatccgagatatcacgctagagaaattgcccaatggcgaagtgaatatcatcactgtccagtcattttaggaagtgcaacaccatgtcttgaaagttatgcacgagctgaaaaaggcgtttatcatttgctatcattaccaaacagagtgaaccaacaagctttacctgaaattgatatagtagacatgcgtgaagaattgagtgaaggtaatcggtcaatgttttcaaaagatttacgtgaagccatacaattaagattagatcgacaggaacaagttgttttatttttaaatcgacgtggttatgcatcgtttatgttatgtcgggattgtggatatgtaccgcaatgtccaaactgtgatatttcattaacgtatcataaaacgacagacttattaaaatgtcactattgtggttaccaagagacgccaccgaatcaatgtccaaattgtgagagtgaacacattcgacaagtaggtactggtactcagaaagttgaagaactattgcaacaagaatttgaagatgcgcgcataattaggatggatgtagatacaacctcaaagaaaggtgcacatgaaaagttattgactgaattcgaaaaaggtaacggtgacattttactaggtactcagatgattgcgaaaggattagattatccaaatattactttagttggtgtgctgaatgcagatacaatgttaaatttacctgattttcgggcgagcgaacgtacttatcaactattaacgcaagtggctggtagagctggtcgtcatgaaaaggcaggtcaagtcatcattcaaacgtataatccagatcattattcaatattggatgttcaaaaaaatgattatttaacattttatcgtcaggaaatggaatatcgtaaattaggaaagtatccaccgtattattatttgattaatttcacaatctcacataaagaaatgaagaaggttatggtagcatcgcagcatgttcataaaattttattacagcatttaacagaaaaagcgcttgtactaggtccatctccggcagcacttgcgagaatcaacaatgaatttagattccaaattttagtgaaatataaaagtgaacctggattattacaagccattcagtttttagatgactattaccatgaaaaatttataaaagaaaaattagcattgaagattgatattgatccacagatgatgatgtaacattactaattattagaaacaagttcagtatgtacgagtatttgaaccagtgtttgaatatttactttaagtacagaaaaagggcagaatatacaactgttaactatttaaattagcagtttatattctgtctttttatatggctttataacttacgtgattttggtttgataaggaatttattagtattttcatttacgaattctgattttaatgcaagcgccatacttactgatgaataaaagtactaatgattaaacaaactatttttaaatggcaaattgaaatagtgcgaattttaaacttataaattaatggctataaactattttatatctatctatgttttaactacttaaattattagacaaaacaattttcttaaattatcaattaaagtatttaaaaatattgatggttaatgtaaaatatcaatataaataagttttttaaatttatgtatgtttatttgattcaaacaaaataacttaagaggagaaagtttatgaaaaagacactgggatgtttacttttaattatgcttttagtcgtagcaggttgttcttttggtgggaatcataaattatcatcaaagaaatcagaagaatcaaaacaagaaactgtaaaaaaagaatcggaagaagagaaagatccagatttagagaaatatgaagaaatagagaagaaaatgaaaggaattaaagatgcgccatctcttgataagttggatccattaatgacagaaaagtcgtttacgaatagtaaagggattcaaggatggaaagattacaaagaattaatgggtaaagtggaacttgcagattatagatttactaaagattcaaaaggatcttcaataaaagatgttgatgcattctttaaaggtaagaaaggtataaaaaggaaagtgattgaaacacacgatgatgtaaaacaagttgattattggtatgtagatccagatggaaagaaaattggcaattcaaacacacctgttttttacgcagaaattatgacaaaatataaagatggaaagttagtttatgcatcagtcgaaccaggatcttacgtaatacataaagatgatgcaattaaatatgacgattattctaagttaaaaaaattaagtcagctaactaaacttgatcatccaaaaccagttccatatagcgtagctcaaatcaaatctttcggagtacctttaacaagcgtttcatttatgacacatggatcaaaggatactaaagatgaagtgttgccggcattggcctatttcactttttcaccaaaaaattatgaagacaagtctaatccagatccaaaagttttaaatttagtacatatggatttcttaaatgcatctagtgattttggtaacgcacattttgttgttttaagtaaatatattaaagagtatgaatcaaactatgaaacagcgtcagatgattctttaaaatagtatttactgtgtgaaaaataaatagtgtactacattaaataatcgcaataataatcccgataaacaatcagcattactgcttatcacatagagttcgtaataactataactctatgattcgcaaataataaatgattgtcatcgcgatttatttttatcaatttataaagtgacattaccttgttcatcagcaggtttgaaaacagtaatcactgcactaataattgctaaaatgtgtgggatacctgtccaacagaatattaagtgtagaataccttgcatattcttgccggcataaaatttatgaataccaaaactacctaagaacaatgctaataaaatataaataactttgtttacttgcatttctttccctccagttgaattgcttataatgacattagcttctctttttattatacccacttttagttcaaacattctagtttaagcattcccaatcatctaaatttcagttattcaatccttacaataaatttaggattacatttcagttgcattgtattattttacgtgtgaaatatacgtaatgaatcacatgacaatcttcaaattgaaaaatatacattctatgatgtaaggtcgcatttttaatatatttacgttataatagtttgatgaattttattgaggagtaagagttatggcgattaaaaagttagtaccagcatcgcatcctattttaacgaaaaaagcgcaagcagttaaaacatttgatgattcgttaaaaagattattacaagatttagaagatacaatgtatgcacaagaagctgctggcttatgtgcacctcaaattaatcagtcattgcaagtggcaattattgatatggaaatggaaggattattacaacttgttaatccgaaaattattagtcaatcaaatgaaacaataacagacttagaaggttcaattacattgccagatgtttacggcgaagtgacaagaagtaaaatgatagttgtcgaaagttatgacgtcaatgggaacaaagttgaactaactgcacatgaagatgtagcaagaatgattttgcatattatagatcaaatgaacggtatcccttttacagaacgtgcggaccgtattttaacagataaagaagtggaggcatattttataaatgactaaaataatatttatgggtacaccagacttttcaacaactgttttagaaatgcttattgcagaacatgatgtcattgcagtcgtaacgcaaccagatcgacctgttggacgtaaacgtgttatgacaccaccaccagttaaaaaagttgcaatgaaatatgatttacctgtatatcaacctgaaaaattaagtggatcagaagaattagaacaattgcttcaattagatgtagatttaattgtaactgctgcttttggacaattattacctgaatcattgttggcattaccaaatcttggggcaattaatgtacatgcatcattgttaccgaagtatagaggtggtgcaccaattcatcaggcaattatcgatggtgaacaagaaaccggcataacaattatgtatatggttaaaaaattagatgcgggtaatattatttcgcaacaagcaattaaaatagaagaaaatgataatgtcggtacgatgcatgataaattaagtgtattaggggcagatttattaaaagaaactttaccatctattatagagggcacaaatgaaagcgtacctcaagatgatacgcaagcaacatttgcttccaatattcgacgcgaagatgagcgaattagctggaataaaccaggaagacaagtgtttaatcaaattcgtggattatcaccatggccagttgcttatacaactatggatgacactaacttgaaaatatacgatgctgaactcgttgagactaataagataaacgagcctggaaccattatagaaacgactaaaaaagccattattgttgctacaaatgataatgtagctgttgcaattaaagatatgcaattagctgggaaaaagagaatgttagctgccaattatttaagtggtgcgcaaaacacactagtagggaagaaacttatatgatagaaaacgtgagaagtcttgcttttgacacgattcaagatatattaaatgaaggtgcgtatagtaacttgcgtatcaatgaagtgttgtcagaaaatgaattaaatgcaatggataaggctttatttacagaaattgtctacggaaccgttaaaagaaaatatacgttagatttttatttaaagccttttgtgaaaacaaagattaaggcatgggttaggcaattattatggatgagtatttatcaatatgtttatttagataaagttccaaatcatgccattattaatgaagcagttgaaatagcaaaagaacgcggtggctatcataatggtaatgtcgtaaatggtattttacgtacaatgatgcgtagtgacttacctgattttaatgaaattgcagatcctaaaaaaagaatggcaatcgagtatagtatgccgaagtggattatagatcattgggcaacacattatggtctcgaagaaactgaaacaattttacagtcatttttagaaacgacatcaacaactgtgcgtgccaacctgacgcgagcatcattagatgatattattgaaaagttgcaagacgaaggttatgacgttgaaaaagatcatgacttaccttattgtctccatataggaggacaaccaattattcattctcgttcatttaaagatggattcgtttcaattcaagataaaagctcaatgtttgttgcacacattatgaatgtagaccgacatgatcacgtattagatgcatgtagtgcacctggcggtaaagcttgtcacattgctgaagttttaatgccagaagggcaagttgacgcttcagatatacatgatcacaaaatagacttaattaattttaatataaaaaaattacgattaacaaatattaaagcttttcaacatgatgcgacaaaaccttatgataaaacatacgataagatacttgttgatgcaccatgtagcggattaggtgtaatgagacataagccggagattaagtatactcaaagcaaacaacatattgagtcactagttgaattacagcttgaaatattggaaaatgtaaaaaacaatgtaaaaataggtggcgaaatcatctattcaacatgtacaattgagcaactagaaaatgaaaacgtgatttatacgtttttgaaaaataataaaaacttcgaatttgaaccgtttcaacatccgataactggagagttggtcaaaacgttacaaatcatgccgcaagactttaattcagatggattctttatcactaagataaaaagaaaggacaattaggaatgataactgctgaaaagaaaaagaagaataaatttcttccaaattttgacaagcaatcaatatattcattgcgatttgacgaaatgcaaaactggctcgttgaacaagggcaacaaaaatttcgagcgaaacagatttttgaatggttatatcaaaaaagagtagattcgattgatgaaatgacgaacttatcgaaagacttacgacagcttttaaaagataactttactgttacaactttaacaactgtagtaaaacaagaaagtaaagacggtacaattaaattcttatttgaattacaagatggctatacaattgaaactgttttaatgagacatgattatggaaattcagtatgtgtaacgacacaagtaggttgtcgcatcggatgtacgttttgtgcttctacacttggcggcttaaaaagaaaccttgaagctggcgaaattgtttcacaagttttaacagttcaaaaagcccttgatgctacagaagagcgcgtatctcaaattgtcataatgggtatcggtgaaccatttgaaaattatgatgaaatgatggactttttaagaatcgtcaatgatgataacagtttaaatattggtgcacgtcacattacagtatcaacatcaggtatcattcctagaatatatgactttgcggatgaagatattcaaattaattttgctgtaagcttacacgccgcaaaagatgaagtgcgatcacgcttgatgccaattaaccgtgcatataatgttgagaagttaatcgaagcaattcaatattatcaagaaaaaacaaatcgtcgtgttacttttgaatatggtctgtttggtggtgtgaatgaccaactagaacatgcaagagaattagcacatttaataaaaggcttaaactgccatgttaacttaattcctgtcaaccatgttccagaaagaaattatgtgaaaacggctaaaaatgatatctttaaatttgaaaaagaattaaagagactaggaattaatgccacaatacgtcgtgaacaaggttcggatattgacgcagcttgtggtcaattaagagcaaaggaacgacaagtagaaacgaggtaaagacaaatgctagaggcacaattttttactgatactggacaacatagagataagaatgaagatgcgggtggtattttttataatcaaactaatcaacaacttttagttctgtgtgatggtatgggtggccataaagcaggagaagttgcaagtaaatttgttacagatgagttgaaatcccgttttgaagcggaaaatcttatagaacaacatcaagctgaaaattggttgcgtaataatataaaagatataaattttcagttatatcactatgcacaagaaaatgcagaatataaaggtatgggtacaacatgtgtttgtgcacttgtttttgaaaaatcagttgtgatagcaaatgtcggtgattctagagcctatgttattaatagtcgacaaattgaacaaattactagtgatcactcatttgttaatcatcttgttttaacgggtcaaattacgccggaagaagcatttacacatccacaacgtaatattattacgaaggtgatgggcacagataaacgtgtgagtccagatttgtttattaagcgattaaatttttatgattatttattattaaattcagatggattaactgattatgttaaagacaatgaaattaagcgtttgttagtaaaagaaggtacaatagaagatcatggtgatcaattaatgcaattggcattagataaccattcgaaagataacgttactttcatactcgcggctattgaaggtgataaagtatgataggtaaaataataaatgaacgatataaaattgtagataagcttggcggcggtggcatgagtaccgtttatcttgctgaagatacgatacttaacattaaagttgcaattaaggcgatttttataccacctagagaaaaagaagaaacattaaaacgttttgaacgagaagtacataactcatcacagctatcacatcaaaatatagtaagtatgatcgatgttgatgaagaagatgactgttactacttagtaatggaatatatcgaaggtccgactttgtctgagtatattgaaagtcatgggccattaagtgttgacacagcgattaattttacgaatcaaatattggatggcattaaacatgcgcatgatatgcgtattgtacatagagatattaagccacaaaatatattaattgacagcaataaaacgttgaaaatatttgattttggaattgctaaagctttaagtgagacgtctttaactcagactaatcatgtgttaggtactgtgcagtacttttcgccagaacaagcaaaaggtgaggcaacggatgaatgtacagatatttattctataggtattgtgttatatgaaatgcttgttggtgaaccaccctttaatggagaaactgcagttagcattgcgattaaacatattcaggattctgtgccaaatgtgacaacagatgtacgtaaggatattccgcaatctttaagtaatgtcattttacgcgctacagaaaaagacaaagcgaatcgttacaaaacaattcaagaaatgaaagatgatttgagtagtgttttacatgaaaatcgagcgaatgaagatgtctatgaactcgataaaatgaaaacgatagcggtacctttgaaaaaagaagatctagcaaagcatattagtgaacataagtcgaatcaacctaaacgtgaaacgacgcaagtacctattgtaaatgggcctgctcatcatcagcaattccaaaagccagaaggtacggtgtacgaaccaaaacctaaaaagaaatcaacacgaaagattgtgctcttatcactaatcttttcgttgttaatgattgcacttgtttcttttgtggcaatggcaatgtttggtaataaatacgaagagacacctgatgtaatcgggaaatctgtaaaagaagcagagcaaatattcaataaaaacaacctgaaattgggtaaaatttctagaagttatagtgataaatatcctgaaaatgaaattattaagacaactcctaatactggtgaacgtgttgaacgtggtgacagtgttgatgttgttatatcaaagggccctgaaaaggttaaaatgccaaatgtcattggtttacctaaggaggaagccttgcagaaattaaaatcgttaggtcttaaagatgttacgattgaaaaagtatataataatcaagcgccaaaaggatacattgcaaatcaaagtgtaaccgcaaatactgaaatcgctattcatgattctaatattaaactatatgaatctttaggcattaagcaagtttatgtagaagactttgaacataaatcctttagcaaagctaaaaaagccttagaagaaaaagggtttaaagttgaaagtaaggaagagtatagtgacgatattgatgagggtgatgtgatttctcaatctcctaaaggaaaatcagtagatgaggggtcaacgatttcatttgttgtttctaaaggtaaaaaaagtgactcatcagatgtcaaaacgacaactgaatcggtagatgtaccatacactggtaaaaatgataagtcacaaaaagttaaagtttatattaaagataaagataatgacggttcaactgaaaaaggtagtttcgatattactagtgatcaacgtatagacattcctttaagaattgaaaaaggaaaaacagcaagttatattgttaaagttgacggtaaaactgtagctgaaaaagaagtcagctatgatgatgtataaatataattgaagtaaatgtaccgaggtttctatttggaagtctcggtatttttatgttgagattgcggtagttttaaaatgcttcatgtcatcatatacaggtgagcattgtctatcaattctgtatcactctcacaatatttatatcatttgaaatgatcatttatatattaattttccagtctttgatataataaatgcagtaaaattaatcgagaggtgccattttgaagacaggtcgaatagtgaaatcaattagtggggtatatcaagtagacgttaatggcgaacgtttcaatacaaaaccacgaggattatttagaaagaaaaaattttcaccggtagttggtgatatagtggaatttgaagttcaaaacattaacgaaggttatattcatcaagtgtttgagcgggaaaatgagttgaaaagaccacctgtaagtaatatagatacactagtaattgtaatgagtgctgtcgagccaaatttttcaacgcaattattagatcgatttttagttattgcacattcgtatcagttaaatgcgagaattttggtgactaaaaaagataaaacaccaattgaaaagcagttcgaaataaatgagttgttgaaaatatatgaaaatattggctatgagactgaatttattggaaatgatgatgatcgaaaaaaaattgtagaagcttggccagctggacttatagtacttagtggtcaatcaggtgtcggtaagtccactttcttaaatcattatcgtccagaacttaatcttgagacaaatgatatatcaaaatcattaaatcgaggaaagcatactacaagacatgtcgaactattcgaacgtcaaaacggttatattgcagacacacctggattcagtgctttagattttgatcatatagataaagatgaaataaaagattattttcttgaattaaatcgatatggtgaaacatgtaagtttaggaattgtaatcatatcaaagaacctaattgtaatgttaagcatcaattagagatagggaatattgcgcaatttagatacgaccattatttacaactatttaatgaaatttcaaatagaaaggttagatattaaatgacaaaactatatccatcattattatctgttgattttttggatttacaacatgaattaaaacgacttgaagaagcaggcgtcgacggagttcattttgatgttatggatggtcaatttgtgcctaatatatctattggtttaccaatattagatgcagtaagaaaaggcacaacattacctatagacgtacatttgatgattgaaaatccagaaaagtatattgcatcatttgcagaacatggtgccgatatgatttcaattcatgtcgaatcaacgcctcatattcatcgtgctattcaaatgattaaacatttagataaaaaagctggtgtagtaattaatcctggtacaccaatatcacaaattgaacctattttagacattgttgattatgtactagtgatgacagttaacccagggtttggtggtcaatcatttattgatcaatgcgtagaaaaaatagcgggtcttaatgctattaaaatggaacgtcaattaaactttgatattgaagttgatggaggcgtaaataccgatacagcgaaagtttgtgttgaaaatggtgctacaatgctagtaacaggttcatttttctttaaacaagaggattataaaaaagtcacacaagcattgaaaggttgagtgtatatgcatataaatttattatgttctgatcgacacttgccgcaagatatttgggccaaaagtaatgaaggtaaatggggcggcgttgatagaggtgctttgattttattgaagcatcaaattatcccttttttctcagtgggagactttgattcagtcagtaaagaagaacgccaacttctaacagaacagttacaaatcaaaccagttcaagctgaaaaagctgatacggatttagctttagcggttgataaagctgttgcacttggatttgatagtattacaatttatggtgcaacaggcggacgattagatcacttttttggggcaattcagttattattgaaaaaagcatattataaacatgatgttcatatagaagttatcgatcaacaaaataaaattgaattattgcctaaaggtcaacatacagttgaaaaagataagagttatccgtacatttcatttataccgatgactgatgatgtagaactttctctagcaggttttaaatataatttagctagacaaatgcttaatataggttctactttaactatttcaaatgaaattgagtctttgcaagcgaaagtaactgtacatgatgggttgattttgcaaattagaagtacagatttaaattaagtatattcaaatttgtgaggatttttaataaagtgcatgagttatttaataaagtgacgtttatagatagaatttataacataataatagatgaatcacgctgtaattaatgaagattatggcgtgatttattattgaaaggaaaattgtaggtcctagtacattgatttatgtgccaaaatcgatattgaacccataagtccaatttgacagagaaccattattaaacgtattaaccaaattatattgatagttcgaatttcactatgaaccattatgtattgtttggtaacaaaaaaagaactaagaggttgagctcttagttcttaagtaaatgtgtcctccacataaggtcacattttttatgtgcaatatatttattaaactctagttactttaccagattttaaagcacgtgcagaaacccaaacttttttaggtttaccgtcaactaggattctaactttttgaaggttagcgttccatctacgtttagtagagtttaaagcgtgtgaacgtctgttaccagtcgaagctttacgacctgttacgaaacattgtttacccatatgagtacctcctttaataaatataaatacacataactacttatatacttaattaagatagcatagtttcatttgaaaaacaatgaataattttcacataaaagtcaaaaatactgagttttgtgatataattgtagactgtgaagttatgtagtatgatattttagagaaataagtgaatgaaacatttaaaatttttatttaatgatactacatctattaaaagaaaacgcctatagataatcgtcatgagtgtaaattcagtttactcaaaatataataggtgatttaagcgtaagtcattctgataagttgtaccattgatattttataaaaataatcaatgaaacttaaagcgtttatgactacactaagtggtaaaattttaaaagtgattagggaaaacgaataataaactttgaaatttaggagggacaaagatatgacattagagatttcaaatgattacggtaaaattgatatttcaaacgaagtgattgcttcggttgtaggtggaaaggccgttgaatgttatggtattgtaggtatggcatctagacaacaagttagagatggtattgcggaaatactaggacatgaaaattatgctaaaggcatcaaagtaactgaaaataatggcgtagtggatatagatatgtacattattgtaagttacggtgtgaaaatatctgaagttgccaataatgtacaatcaacagtgaaatatactttggaaaaatcacttaatgtatcagtaaattcaatcaatatatatgtacaaggtgtacgtgtgaataatacaggcaagaaagcttaggaggacaacttgaaatgattagcaaaattaatggtaaattatttgccgatatgattatacaaggggcacaaaatttatctaacaatgcagatttggtagattctttgaatgtgtatccagtgccagatggtgatacaggaacaaatatgaatcttactatgacttcaggtcgcgaagaagtagagaataatttgtcgaaaaatatcggcgaattaggtaaaacattctcgaaaggtttactaatgggtgcaagaggtaactctggtgtcatcttgtcacaattattcagaggattttgtaaaaatattgaaagtgaatctgaaattaattcaaaattgttagctgaaagttttcaagctggtgttgaaacggcatataaagctgttatgaaaccagttgaaggtacaatacttacagttgcaaaagatgctgcgcaagctgcaatagaaaaagcaaataatactgaagattgtatagaattaatggagtacattattgtaaaagccaatgaatcacttgaaaacacaccaaacttattagctgtacttaaagaagttggtgttgttgatagtggcggtaaaggtttgttatgcgtttacgaaggattcttaaaagcgcttaaaggtgaaaaagttgaagccaaagttgcaaagatagataaagatgaatttgtacatgatgaacatgatttccatggtgtaattaatactgaagatattatttatggctattgtactgaaatgatggttcgttttggaaagaataaaaaagcctttgatgaacaagaattcaggcaagatatgagtcaatttggtgattctttattagtcattaatgatgaagaaattgtgaaagttcacgtgcataccgaatacccaggtaaagtgtttaattatggtcaacaatatggtgaattaattaaacttaaggttgaaaatatgagagaacagcaccgtgaagtgattcgaaaagaacagcacacagctaaaccgaaaatggaaacggttgaaacagcaattattactatttctatgggtgaaggtatttcagagatatttaaatcaatgggtgccacacatatcattagtggtggacaaacgatgaatccttctacagaagatatcgttaaagtcattgaacaatcaaaatgtaaacgtgcaattattttaccgaataataaaaatatcttaatggcaagtgaacaagcagcgagtattgttgatgcagaagctgttgttattccaacgaaatctattcctcaaggtataagcgcactattccaatatgatgtggacgcaacacttgaagaaaataaagcgcaaatggctgattcagtaaataacgttaaatctggttcattaacgtacgctgttcgtgatacgaaaattgatggcgttgagattaaaaaagacgcgtttatgggcttgattgaagataagattgtaagcagccaaagtgatcaattaacaacggttactgagttgttaaatgagatgttagcagaagatagtgaaatattgactgtgattattggtcaagatgcagagcaagcagttacagataacatgataaactggatcgaagagcaatatccagatgtagaagtggaagttcatgaaggtggacaaccaatttatcaatatttcttttcagtagaataaaaatttaaaataaaaaactaccaatgataaatcatcagttggtagttttttattttgctattttagtgatattgcgggttaaaagtatcgttctcgagttgctaacaatgtcatgttcaacttagtcatgataaaataaataacatactaaatgatacgtaaaatcaaataaaacataggtgatttattttggctaaagtaaacttaatagaaagtccatattctcttttacaattaaaaggtataggtcctaagaaaatagaagtattgcaacaactaaatattcatacagtggaagatcttgttctttatttgccaactagatatgaagataatacagtgattgatttgaatcaagcagaagatcaatctaacgttacgatagaaggacaagtatatacagctccagtagttgcattttttggaagaaataaatcaaaattaaccgttcatttaatggtaaataatattgctgtcaaatgtatttttttcaatcaaccgtatttaaaaaagaaaatcgaattaaatcaaactataactgttaaaggtaagtggaatagggttaaacaggaaattactggtaatagggttttctttaattcacaagggacacaaactcaagaaaacgcagatgttcaattagaaccagtctatcgtattaaggaaggtattaaacaaaagcaaatacgagaccaaattagacaagcgttaaatgatgtgacaattcatgaatggttaactgatgaactaagagaaaaatataaattagagaccttggactttactttgaacacattacatcatcctaaaagtaaagaggatttattacgtgctcgtagaacctatgcatttactgaactgtttttattcgaattacgtatgcaatggctaaatagattagaaaagtcatctgacgaagcaattgaaattgattatgacatagaccaagttaaatcatttattgatcgtttaccttttgaactaactgaagcacagaaatccagtgttaatgaaatttttagagatttaaaagcaccaatacgtatgcatcgattacttcaaggtgatgtaggttcaggaaaaacagtagttgctgcaatttgtatgtatgcgttaaaaactgctggttatcaatcagcattgatggtaccaactgaaattttagcagagcaacatgctgaaagtttaatggctttatttggagattctatgaacgttgcattgttaactgggtcagtaaaaggtaagaaacgaaagatacttttagaacaacttgaaaatggtacgattgattgtttaattggaacccatgctttgattcaagatgatgtgattttccataatgttggtttagtaattacagatgaacaacatcgatttggtgtgaatcaacgccagcttttaagagaaaaaggtgcaatgacgaatgtgttatttatgacagcaacgccgataccaagaacactagcaatatcagtttttggtgagatggatgtgtcttcaattaaacaattaccaaaaggtcgtaaacctatcattactacttgggcaaagcatgagcaatacgataaagttttgatgcaaatgacctcagagttgaaaaaaggtcgtcaagcatatgtcatttgcccgctaatagaaagttctgagcatctcgaagatgttcaaaatgttgtcgcattgtacgagtctttacaacagtattatggtgtttcccgtgtagggttattgcatggtaagttatctgccgatgaaaaagatgaggtcatgcaaaagtttagtaatcatgagataaatgttttagtttctactactgttgttgaagtaggtgttaatgtaccgaatgcaacttttatgatgatttatgatgcggatcgctttggattatcaactttacatcagttacgcggtcgtgtaggtagaagtgaccagcaaagttactgtgttttaattgcatcccctaaaacagaaacaggaattgaaagaatgacaattatgacacaaacaacggatggatttgaattgagtgaacgagacttagaaatgcgtggtcctggagatttctttggtgttaaacaaagtggattgccagatttcttagttgccaatttagttgaagattatcgtatgttagaagttgctcgtgatgaagcagctgaacttattcaatctggcgtattctttgaaaatacgtatcaacatttacgtcattttgttgaagaaaatttattacatcgtagttttgactaattgccatgctgatttgtcaatttgagtgcaacacttcgttaattgagtgatatgacacttgaactatttaaatgtaaagtggtattttaacaatttataaattttcgactaaataatagctaaatattacagttatttgttgagtcggttaaatagaaagtgttatgatatgtgaggaatgtttaagactaggtactaaaaaatgaggggtgagacgttgaaactaaagaaagataaacgtagagaagcaatcagacaacaaattgatagcaatcccttcatcacagaccatgaactaagcgacttatttcaagtgagtatacaaacaattcgtttagatcgcacttatttaaacataccagaattaaggaagcgtattaaattagttgctgaaaagaattatgaccaaataagttctattgaagaacaagaatttattggtgatttgattcaagtcaatccaaatgttaaagcgcaatcaattttagatattacatcggattctgtttttcataaaactggaattgcgcgtggtcatgtgctgtttgctcaggcaaattcgttatgtgttgcgctaattaagcaaccaacagttttaactcatgagagtagcattcaatttattgaaaaagtaaaattaaatgatacggtaagagcagaagcacgagttgtaaatcaaactgcaaaacattattacgtcgaagtaaagtcatatgttaaacatacattagttttcaaaggaaattttaaaatgttttatgataagcgaggataaaattatggttaaattagcaattgatatgatgggtggcgacaatgcgcctgatatcgtattagaagccgtacaaaaggctgttgaagactttaaagatctagaaattatacttttcggtgacgaaaaaaagtataatctgaaccatgaacgaatcgaatttagacattgttctgaaaagattgaaatggaagatgagcctgttagagcgattaaacgtaaaaaagatagctcaatggtaaaaatggctgaagctgtgaaatctggtgaagcagatggatgtgtgtcagcaggtaatactggtgctttaatgtcagctggtttattcattgttggacgtattaaaggtgtagctagaccggctttagtagtaacattgccaacgattgatggaaaaggttttgtctttttagacgttggtgcaaatgctgatgctaaacctgaacacttattacagtatgcgcaactaggggatatttatgctcaaaaaattagaggtattgataatccgaaaatctcattattaaatataggaaccgagccagctaaaggtaatagtttaacgaaaaaatcatatgagttattaaatcatgatcattcattgaattttgttgggaatattgaagcgaagacattaatggatggcgatacagatgttgtagttaccgatggctatactgggaacatggtccttaaaaatttagaaggtactgcaaaatcaatcggtaaaatgttaaaagatacgattatgagtagtactaaaaataaattagcaggtgcaatattgaagaaagatttagctgaattcgctaaaaagatggattactcagaatacggtggttccgtattattaggattggaaggtactgtagttaaagcacacggtagttcaaatgctaaagctttttattctgcaattagacaagcgaaaatcgcaggagaacaaaatattgtacaaacaatgaaagagactgtaggtgaatcaaatgagtaaaacagcaattatttttccgggacaaggtgcccaaaaagttggtatggcgcaagatttgtttaacaacaatgatcaagcaactgaaattttaacttcagcagcgaacacattagactttgatattttagagacaatgtttactgatgaagaaggtaaattgggtgaaactgaaaacacacaaccagctttattgacgcatagttcggcattattagcagcgctaaaaaatttgaatcctgattttactatggggcatagtttaggtgaatattcaagtttagttgcagctgacgtattatcatttgaagatgcagttaaaattgttagaaaacgtggtcaattaatggcgcaagcatttcctactggtgtaggaagcatggctgcagtattgggattagattttgataaagtcgatgaaatttgtaagtcattatcatctgatgacaaaataattgaaccagcaaacattaattgcccaggtcaaattgttgtttcaggtcacaaagctttaattgatgagctagtagaaaaaggtaaatcattaggtgcaaaacgtgtcatgcctttagcagtatctggaccattccattcatcgctaatgaaagtgattgaagaagatttttcaagttacattaatcaatttgaatggcgtgatgctaagtttcctgtagttcaaaatgtaaatgcgcaaggtgaaactgacaaagaagtaattaaatctaatatggtcaagcaattatattcaccagtacaattcattaactcaacagaatggctaatagaccaaggtgttgatcattttattgaaattggtcctggaaaagttttatctggcttaattaaaaaaataaatagagatgttaagttaacatcaattcaaactttagaagatgtgaaaggatggaatgaaaatgactaagagtgctttagtaacaggtgcatcaagaggaattggacgtagtattgcgttacaattagcagaagaaggatataatgtagcagtaaactatgcaggcagcaaagagaaagctgaagcagtagtcgaagaaatcaaagctaaaggtgttgacagttttgcgattcaagcaaatgttgccgatgctgatgaagttaaagcaatgattaaagaagtagttagccaatttggttctttagatgttttagtaaataatgcaggtattactcgcgataatttattaatgcgtatgaaagaacaagagtgggatgatgttattgacacaaacttaaaaggtgtatttaactgtatccaaaaagcaacaccacaaatgttaagacaacgtagtggtgctatcatcaatttatcaagtgttgttggagcagtaggtaatccgggacaagcaaactatgttgcaacaaaagcaggtgttattggtttaactaaatctgcggcgcgtgaattagcatctcgtggtatcactgtaaatgcagttgcacctggttttattgtttctgatatgacagatgctttaagtgatgagcttaaagaacaaatgttgactcaaattccgttagcacgttttggtcaagacacagatattgctaatacagtagcgttcttagcatcagacaaagcaaaatatattacaggtcaaacaatccatgtaaatggtggaatgtacatgtaatatatttgagctaaagctcattgacgcagtggttgactggtcatccaatggagaattgtctgacctagtcaactttgcggggggaattctaagcaacctagataaggttccagaatttctccctaagaaacactaatcaataaattgataagtgtttctaaaatttctacttgttttttagaatttaaaatgggaaaatatagtagtctatgtataggcatttttaaaggaggtgaatcgacgtggaaaatttcgataaagtaaaagatatcatcgttgaccgtttaggtgtagacgctgataaagtaactgaagatgcatctttcaaagatgatttaggcgctgactcacttgatatcgctgaattagtaatggaattagaagacgagtttggtactgaaattcctgatgaagaagctgaaaaaatcaacactgttggtgatgctgttaaatttattaacagtcttgaaaaataataaatcttacatctgggtcgtcagtattgtcgactcagtttttttctttaattatcaatagttttaacgtaaaattaaagatgattcaagagcaacacataaaggagataaaataatgtctaaacaaaagaaaagtgagatagttaatcgttttagaaagcgctttgatactaaaatgacagagttaggctttacttatcaaaatattgatttataccaacaagcattttcgcattcgagttttattaatgattttaatatgaatcgtttagaccataatgagcgtttagagtttttgggtgatgcggtattagaattgacggtttcacgatatttatttgataaacatcccaacttgccagaagggaatttaacaaaaatgcgtgccactattgtatgtgagccctcacttgtaatatttgcgaataaaattggattgaacgaaatgattttacttggtaaaggtgaagagaaaacagggggacgtacaagaccatcattaatatcagatgcattcgaagcatttattggggcattgtatttggatcaaggactagatatagtttggaaatttgctgagaaagtcattttcccacatgtagaacaaaatgagttattaggcgtggtagattttaaaacacaattccaagaatatgtgcaccagcaaaataaaggtgatgtaacctataatttaataaaagaagagggaccggcacatcatcgtctattcacttcagaagttattctgcaaggggaagcaatagctgaaggtaaagggaaaacgaaaaaagaatcagaacaacgtgctgctgaaagtgcctataagcaattaaaacaaattaaatagaaatttatatgatacgacatataggtgttcgatttaggatttaaggaagaatttttaatattttatggaacaacttcgaaatttaatatacaaatactaaaatatcgtatacatgtgttctttaaaattgtgataaggagtttaggatggtttatttaaaatcaatagatgccattggatttaagtcttttgcagatcaaaccaatgttcaattcgataaaggtgtaactgcaattgttggtccaaatggaagcggtaaaagtaatattacagatgctattaaatgggtgttgggtgaacaatcggctaaatcattacgtggctcaaaaatggaagatattatcttctcaggtgcagaacatcgcaaagctcaaaattatgctgaagtacagttaagattagataatcattctaaaaagctcagtgttgatgaaaacgaagttattgtaacaagaagattgtatcgaagtggtgaaagtgagtactacataaataatgaccgtgcaagattaaaagatattgccgatttatttttagattctggattgggaaaagaagcgtatagcattatctcgcaaggtagagttgatgaaatactaaatgctaaaccaattgatagacgtcaaattattgaagaatcggctggtgtacttaaatataaaaaacgtaaggctgaatcattaaataaacttgaccaaacagaagataatttaacgagagtagaagacattttatatgatttggaaggtcgcgtagaacctctaaaagaggaggcagctatagctaaagaatataagacactttcacatcaaatgaaacatagtgacattgtagttacagtgcacgatattgatcaatatacaaatgacaatagacaattagatcaacgtttaaatgatttacaaggccaacaagcaaataaagaagctgacaagcaacgtttaagccaacaaattcaacaatataaaggtaaacgtcatcaacttgataatgatgttgaatcgcttaattatcaattagtaaaagctacggaagcctttgaaaaatatacgggacaattaaatgttttggaagaacgtaagaaaaatcaatctgaaacaaatgcacgatatgaagaagaacaagaaaatttaatggagcttttagaaaatatatcaaatgagatttctgaagctcaagatacttataagtctctgaaaagtaaacaaaaagaactcaatgctgtcattcgtgaacttgaagaacaactatatgtttcagacgaagcacatgatgaaaaattggaagaaattaaaaacgaatactatacattaatgtcagagcaatcagatgttaacaatgatattcgttttttaaagcatactatagaagagaatgaggctaaaaaatcaagactagattctcgattagttgaagtttttgagcaattgaaagatattcagggtcaaataaaaacgacaaaaaaagaatatcaacagaccaacaaagaactttctgctgtagataaagaaattaaaaatatagaaaaagacctcactgatacaaaaaaagcacaaaatgaatacgaagagaaattgtatcaagcatatcgatataccgaaaaaatgaaaacacgtattgatagtttggcaacgcaagaggaagaatatacttattttttcaatggcgtcaaacatattttgaaagctaaaaataaagaattaaagggtatttatggtgcagttgcggaaattattgatgtgccatctaaattaactcaggcaattgaaacagcattaggtgcttcattacaacatgtcattgtagattcagaaaaagatggacgccaggctattcaatttttaaaagaacgtaatttaggtcgtgcgacgtttttaccattaaatgttatacagagtagagtggtagcgactgatattaaatctattgctaaagaggcaaacggatttattagtatcgcttcggaagcagttaaagtagcaccagaatatcaaaatattatcgggaatttattaggtaatacgattatcgttgatcatttaaagcatgcaaatgaattggcacgtgcgattaaatatcgaactcgtattgttactttggaaggtgatattgtaaatcctggtggttctatgactggtggtggcgctcgtaagtcaaaaagtattctgtctcaaaaagacgagttgacaacaatgagacaccaattagaagattacttgcgtcaaacagaatcatttgaacaacaatttaaagagttgaagataaaaagtgatcaattaagtgaactgtattttgaaaaaagtcaaaagcataatacacttaaagagcaagtgcatcattttgaaatggagctcgatagattaactacacaagaaacacaaataaaaaatgatcatgaagaattcgaatttgaaaaaaatgatggttatacgagtgacaaaagtcgacaaactttgagtgaaaaagaaacttatctagaaagtattaaagcatctttaaaacgactagaagatgaaattgaacgctacacaaaactttctaaagaaggtaaggaaagcgttactaaaacacaacaaaccttacatcagaaacaatctgatcttgctgtggttaaagagcgtattaaaacacaacaacagacaatagatcgattaaataatcaaaatcaacaaactaaacatcaattaaaagatgttaaagaaaaaattgcattctttaattcggatgaagtgatgggcgaacaagcttttcaaaatattaaagatcaaattaatggtcaacaagaaacgagaacacgcttatcagatgaattagataaattgaaacaacaacgtattgagttgaatgaacaaatcgatgcgcaagaagctaaactacaagtttgtcaccaagatattttagctatcgaaaatcactaccaagatattaaagctgaacaatcaaagctagatgtattaattcatcatgcgatagatcatttaaatgatgaatatcaattgactgttgaacgtgcgaaatctgaatatacgagtgatgaatcgattgacgcattacgtaaaaaagttaagttaatgaagatgtcgattgatgaactaggtcctgtaaacttaaatgcaattgaacaatttgaagagttaaatgaacgttatacatttttaagtgaacaacgtacagatcttcgtaaagctaaagaaacattagagcaaattataagtgaaatggatcaagaggttactgaaagatttaaagaaactttccatgctattcaaggacattttacagctgtgttcaaacaattgtttggtggaggcgatgcagaattgcaattaactgaagccgattatttaacagctggtattgatattgtggtacaaccaccgggtaaaaagttgcaacatttatcgttactgagtggtggtgagcgtgcattaactgctattgctttactatttgcaattttaaaagtaagatctgcaccttttgttatattagatgaggttgaagctgcactagatgaagcaaatgttattagatacgcaaaatatttaaatgagttatcagacgaaacacaattcattgttattacacaccgtaaaggaacaatggaatttgcagataggttatacggtgtaacaatgcaagaatcaggtgttactaaacttgtgagtgtgaatttaaatacaatagatgatgtgttgaaggaggagcaataatgagcttttttaaacgcttaaaagataagtttgcaacaaataaagaaaatgaagaagttaaatccttaacagaagaacaaggtcaagacaaattagaagatacacattctgaaggttcaacgcaggacgcaaatgatttagcagaaaatgctgaagtgaaaaagaagccacgcaagttgagtgaagcggattttgatgacgatggcttaatatcaattgaagattttgaagaaattgaagctcaaaaaatgggtgctaaatttaaagcaggactcgaaaaatctcgtcaaaatttccaagaacaattaaataatttgatagcgagatatcgtaaagtagatgaagacttttttgaagctttagaagaaatgttaatcactgcagacgtcggttttaatacagtgatgacgttaactgaagaattacgtatggaagcacaacgacgtaatattcaagatactgaagatttgcgtgaagtcattgttgaaaaaatcgtagagatttaccatcaagaagatgataattcagaagctatgaacttagaagatggtcgtttaaatgtcattttaatggttggtgtgaatggtgttggtaaaacaacaacaattggaaaattagcttaccgatataaaatggaaggtaaaaaagtaatgttagctgcgggcgatacttttagagcgggtgctattgatcaattgaaagtttggggcgaacgtgttggtgtagacgtaattagccaaagtgaaggttctgatccagctgctgttatgtatgatgcgattaatgccgctaaaaacaaaggtgttgatattttaatctgtgataccgctggacgtttacaaaataaaacaaatctaatgcaagaattagaaaaagttaagcgtgtaattaatcgagcagtgccagatgcgcctcatgaagcattactatgtttagatgctacaactggtcagaatgcgttgtcacaagctagaaactttaaagaagtaacaaatgttacaggtattgtattaacgaaattagatggtacagccaaaggtggtatcgtattagccattcgtaatgaattgcacatcccagttaaatatgtaggtttaggtgagcaattagatgacttacaaccatttaaccctgaaagttatgtctacggcttattcgctgatatgattgaacaaaatgaagaaataacaacagttgaaaatgatcaaattgtaacagaagaaaaggacgataatcatgggtcaaaatgatttagttaaaacgttacgaatgaattatttgtttgatttttatcaatccttattgacgaataaacaacgtaattatttggaattattttatcttgaagattattctttaagtgaaatcgcagatacttttaatgtgagtagacaagcagtttatgataatataagaagaactggcgatttagttgaagattatgaaaagaaattggaattataccagaaatttgagcaacgccgagaaatatatgatgaaatgaaacaacatttaagtaatccagaacaaatacaacgttatattcaacaattagaagacttagaatagatataaattgagggaggacatcgatatggcatttgaagggttatcagaacgcttgcaagcgacgatgcaaaaaatgcgtggtaagggtaaacttactgaagctgatataaagataatgatgcgtgaagtaagattagcgttacttgaggctgacgtaaactttaaagtggtaaaagaatttattaaaacagtatcagaacgcgcattaggttccgatgtaatgcaatcattaacaccagggcaacaagttattaaaatagttcaagatgaattaacgcagttgatgggtggagaaaatacgtcgattaatatgtcaaataaaccacctactgttgttatgatggttggtttacaaggtgctggtaaaacaacaactgcaggtaaattagcattattgatgcgtaaaaaatacaacaaaaaacctatgttagttgcagcagatatttatcgtccagcagcgataaatcaattacaaacagtagggaaacaaattgatattcctgtatacagtgaaggagatcaagtaaagccacaacaaattgtaactaatgcattaaaacatgctaaagaagaacatttagactttgtaatcattgatacagcaggtcgattacacatcgatgaagcattgatgaacgaattaaaagaagtaaaagacattgctaaaccaaacgaaattatgttagttgtcgattcaatgacgggtcaagatgctgtcaatgttgcagaatcttttgacgatcaacttgatgtcacaggtgttaccttaactaaattagatggtgatacacgtggtggtgcagctttatctattcgttcggtgacacaaaaaccaattaaatttgttggtatgagtgaaaagttagatggtttagagctattccatcctgaacgtatggcatcacgtattttaggtatgggtgatgtgttaagtttaattgaaaaagcgcaacaagatgtggatcaagaaaaagcaaaagatttagagaaaaagatgcgtgagtcatcgtttactttagatgattttttagaacaacttgatcaggtgaaaaatctaggaccactggatgatattatgaaaatgattccaggtatgaataaaatgaaagggctagataagcttaatatgagtgaaaagcaaattgatcatattaaagcgattatccagtcaatgacgccggctgaaagaaacaatccagacacattgaatgtatcacgtaaaaagcgtattgctaaagggtctggtcgttcattacaagaagtcaatcgtttgatgaaacaatttaacgatatgaagaaaatgatgaaacagttcactggtggcggtaaaggtaaaaaaggtaaacgcaatcaaatgcaaaatatgttaaaaggtatgaatttaccgttttaatgtttaatataacacgctgatttttgttgcaatgagatgtgcatcccgaaagttatactaaagaatataactttatggggtgcatatttttagatacacaataataattaaaaactgaaattgctgatttgctagaacatgaggttattgttgctaatattaataagttatattgggggaacgtgtgcggtagaagtggtaccattcatgtccttacgagataaattaacttaacacgtaggtggtgaaatttactatgaatttttataacctattaacagtctaatttagtaatcacatagttattattgtaagaaaaaggttcaataattttcctggtaaagaaaaaactctttacaaacattcatacacctgttaatattatttcttgtagaaaataaaaattaaaacatgacttaaaggagattttataaatggcagttaaaattcgtttaacacgtttaggttcaaaaagaaatccattctatcgtatcgtagtagcagatgctcgttctccacgtgacggacgtatcatcgaacaaatcggtacttataacccaacgagcgctaatgctccagaaattaaagttgacgaagcgttagctttaaaatggttaaatgatggtgcgaaaccaactgatacagttcacaatatcttatcaaaagaaggtattatgaaaaaatttgacgaacaaaagaaagctaagtaatttagcgtaaaattgttctaacaataagaataactcgtttacactgacagttattactcaatgatacgttgggaatatcacatgttagtaatatagaacgtattgggtaccataatggtgccctttttctttgaattattttcaattaaaatagaagtgttcaaagcatagagttggaggtaatagaatgagagttgaagttggtcaaattgttaacacacatggtattaaaggtgaaattaaagtaaaatccaattcagactttacagacgttcgttttcaacccggtcaagtgctgacagttgtgcataacaataacgaccttgaatatactgttaagtcacatagagtgcataaagggcttcatatgcttacatttgaaggtattaataatattaatgatattgagcatttaaaagggagttctatttatcaagagcgtgatcatgaagatatcgtacttgaggaaaatgaattttattattcagatattataggatgtacagtttttgatgatcaagaaacaccaataggtcgtgtaattaatatatttgaaacaggtgcgaatgatgtgtgggtgattaaaggatctaaagaatatttgattccttatattgctgatgttgtaaaagaagtggatgttgaaaataaaaaaattatcatcacgccaatggaaggattgttggattaatgaaaattgattatttaactttatttcctgaaatgtttgatggtgttttaaatcattcaattatgaaacgtgcccaagaaaacaataaattacaaatcaatacggttaattttagagattatgcaattaacaagcacaaccaagtagatgattatccgtatggtggcggacaaggtatggtgttaaagcctgaacctgtttttaatgcgatggaagacttagatgtcacagaacaaacacgcgttattttaatgtgtccacaaggcgagccattttcacatcagaaagctgttgaattaagcaaggccgaccacatcgttttcatatgcggacattatgaaggttacgatgaacgtatccgaacacatcttgtcacagatgaaatatcaatgggtgactatgttttaactggtggagaattgccagcgatgaccatgactgatgctattgttagactgattccaggtgttttaggtaatgaacagtcacatcaagacgattcattttcagatgggttattagagtttccgcaatatacacgtccgcgtgaatttaagggtctaacagttccagatgttttattgtctggaaatcatgccaatattgatgcatggagacatgagcaaaagttgatccgcacatataataaaagacctgacttaattgaaaaatatccattaactaatgcagataagcaaatattagaaagatataaaataggattgaaaaaaggttagtattgtgctaacataatctgagtgtggaaacactaaaatcactatgatccgctgctatatatttgtcgaggcaagaacataggttgaagaggagaatttataatgacaaatcacaaattaatcgaagcagtaactaaatcacaattacgtacagacttaccaagtttccgtcctggtgatactttacgtgtacacgtacgtatcattgagggtactcgtgagcgtatccaagtattcgaaggcgttgtaattaaacgtcgtggcggtggcgtttctgaaacgtttacagttcgtaaaatttcatcaggtgttggcgtggaacgtacattcccattacacacaccaaaaattgaaaaaatcgaagttaaacgtcgtggtaaagtacgtcgtgctaaattatattacttacgtagtttacgtggtaaagctgctagaatccaagaaattcgttaatcagcatttaaacaaagctatgtatgagtcaaattcgactcaaacaataaagccatctaggtcacttttatggagtgatatagatggctttttttgctgtttagttaatgtaaagttgataatgtaattgtttattccttctctattcataacgtgtttgctcaaaatggttatataaacaaaaatctactaagtgccattgaaaaggacttagtagatttattaaatatatgcgtagcaacattatttttgtcttgcccatctcgtgaaaataatactacatataatgccaaatatagtaattgttataagtaaataatagtatggtggggtatagctcaattgaatctttgttatatttttaggtgctttaatgccggtcataacaccatttacttgttcaactttaagactttgatcacctgatgtcgctttcataccttgattatatgctgttggcaaaacaatatacccagatgaatttttatttttagtaatagtataaccatgctttgtcttactaactttgacagcttctaatgaatttgaagcgtctttaagcgtggtataatcttcgccgtatatcccttttaaatttactcgatacttacctttaggcaatgataatctaattctatctggagctttaatgcgtatcgttacgggtgttacaacgcgtcgatatttataagtgagtttatttctttcttgtgtatattcattcactttaacatcatgagctttatccggcgaaagtaattctaaatccatttcaaaatacaaatctttaaattgattagaaactgattttggcaactgtacagttagaccaccattattttgtttaacttgtaataaatgttttgtaggagattgccaggctgcactatttaatttaattgttgaatctgatagtaaatttttattggctttaaaatgtgtattaacatctttaatattgttagaaacaatcccttgcaacattgcttgttctttatctaatggagattttaattctttattggaaaagaccttatttgtaatatgtgcacttggataatggatggtatttttagaatgaatccaacgaactttattgtctttgtgttcagacttaattttaaatccatatggtaagttgtcatcatgattcactctaattcgatcattaacattccaaagtgatagtaaattttgacgattgccaagtaatctataagtgctgtttttatcgattggcatattaatttggagtgtcttgtcataatattttaaaatgtctccattaaaaatactagaatataatgaaatgccattataatgatatataaatggtgaatttaatgcatagtctgacatataatcaatgcgattaaatgagcctgttgcattttgatttatcttttttataagctggtttacatagttactatggtaatcatgttgtttcaacgttgataatgattgttgataaggtttgattgccatgtttttgttgttatctaaaatgacgatttgttgaatcataacgattaatactaatattgcaacggttaattttttataacgccataaactaaattttaaaataacggcaagcactattagcaggataatacctactataagtgcaagtgggtgtgtcggtgatagtaatacataaagtattgcgatgatgcatacgggtattgttctgattaaataatatttcatatttaatgttgataaatgttgaataaacaatccgcaaagagcacttgatgatagtgctaagatatacacccaacgcctttctggaaatgaaaaaccattaaaagcactgtcgaaatactgtgataatgaacctataaataatatccatgttactattgcgaaaagtctataaaagtaaaaacgatacagtttgaatgacaataatgcaacgatagtaagaattgaaatcgtaatataaaatccatcgctaaagaaaaaataatgataatcaagtggtgtcaaaaacggtatatcaacattgggattttgctttctgtcattttccaaaaacgcagaaatgccagtgaataaaccaaatacacttgataacacactcaaaactgtagcagatatgacgcaaattaatttttgtgttctagagacaatgtcatatttgtaagtgaaaatgagtcgatataaatagtagcaacctataataatagcttgataataactgaaataaaaattgctaaatagtgttaaggctatcgcaacaatgaaaataccgattttgcgttgttgaaaatatctttccaaaccaagaatcgataatggcaataaatataataaatttccataaaatgaccaagtaaaattaaagtatataacgacagttgacatgccgtataaaatcgtagcgatcatatttgctgagcgtttaaagtgtaatattttaaataagtagaaggtcacgacaaatgttatgatagctcgtatcatagccataataagttggtttgtcggccaaaaatgtattgtcgtcggattaaatataccaaccgtttctcctattttaatgaatagaaaatttagccacattaaaggtgacagcgaataataatatgatagtcctttcatataatcgccacctaatccaaacgatgcatcatataaactagaaaaactacgtagatgttcatacaaatacatttgaaatggcatcatttgacggaatccatctccagccccgctaaaaacagtaccattcacaatataatcatagatatgagtagaaaataaaataagcgttaatattacactaatgaaagttataacaaagaattgtttgacgtttgaatttagccacttttttaacacaacattatcctcaactttcaaatttaaaattaagtttaactgaaactaaagttaatgaggttcttgataggtaaagacgaagatgactgtggaacagataccttatcatagttacttaaactttggatcattttcagtttatcattaaacaaatatattgaataataaaaatgtcatactgataaagatgaatgtcacttaataagtaacttagatttaacaaatgatgatttttaattgtagaaaacttgaaataatcacttatacctaaatctaaagcattgttaagaagtgtgacaatgttaaaataaatatagttgaattaatgaatttgttctataattaacaggttatagattttaataatgagaaaagaattgacgaaagtaaggtgaattgaatggttattcaatggtatccaggacatatggcgaaagccaaaagagaagtaagtgaacaattaaaaaaagtagatgtagtgtttgaactagtagatgcaagaattccatatagttcaagaaaccctatgatagatgaagttattaaccaaaaaccacgtgttgttatattaaataaaaaagatatgtctaatttaaatgagatgtcaaaatgggaacaattttttattgataaaggatactatcctgtatcagtggatgctaagcacggtaaaaatttaaagaaagtggaagctgcagcaattaaggcgactgctgaaaaatttgaacgcgaaaaagcgaaaggacttaaacctagagcgataagagcaatgatcgttggaattccaaatgttggtaaatccacattaataaataaactggcaaagcgtagtattgcgcagactggtaataaaccaggtgtgaccaaacaacaacaatggattaaagttggtaatgcattacaactattagacacaccagggatactttggcctaaatttgaagatgaagaagtcggtaagaagttgagtttaactggtgcgataaaagatagtattgtgcacttagatgaagttgccatctatggattaaactttttaattcaaaatgatttagcgcgattaaagtcacattataatattgaagttcctgaagatgcagaaatcatagcgtggtttgatgcgatagggaaaaaacgtggcttaattcgacgtggtaatgaaattgattacgaagcagtcattgaactgattatttatgatattcgaaatgctaaaataggaaattattgttttgatatttttaaagatatgactgaggaattagcaaatgacgctaacaattaaagaagttacgcagttgattaatgcggttaatacaatagaagaattagaaaatcatgaatgctttttagatgagcgaaaaggtgttcaaaatgccatagctaggcgcagaaaagcgttagaaaaagaacaagctttaaaagaaaagtatgttgaaatgacttactttgaaaatgaaatattaaaagagcatcctaatgctattatttgtgggattgatgaagttggaagaggacctttagcaggtccagtcgttgcatgcgcaacaattttaaattcaaatcacaattatttgggccttgatgactcgaaaaaagtacctgttacgaaacgtctagaattaaatgaagcactaaaaaatgaagttactgcttttgcatatgggatcgcgacagctgaagaaatagatgaatttaatatttataaagctactcaaatcgccatgcagcgagctattgatggattatcagtacaaccaacgcatttattgatagacgcgatgacgcttgataatgcactgcctcaagtatctttaatcaagggtgatgcaagaagtgtgtccattgcagctgcaagtatcatggcaaaggtttttcgtgatgattatatgacacagttatctaaagattatcctgaatatggttttgaaaaaaacgcgggttacggtaccaaacaacatttactagcaatcgatgatattggcattatgaaagagcatagaaaaagctttgaacctataaaatcgttactgtaaatcgtaaaattcaattaaatgataaaaaagtagcatttaagtttacaatagcgcttacattttttataattgtaagggaacttaacctaagtaacaggaggatggaagatgaatatccacgagtatcaaggtaaagaaatatttcgttcaatgggcgttgcagttccagaaggacgagtagcatttactgctgaagaagcggtggagaaagcaaaagaattaaattctgatgtttatgttgtaaaagcacaaattcatgctggaggtagaggtaaagcaggcggagtaaaaattgctaaatctttatctgaggtagaaacatatgcaaaagaattattagggaaaactttggtgacacatcaaactggtccagaaggtaaagaaattaagcgtttatatatcgaagaaggttgtgctattcaaaaagaatattacgttggattcgttattgatcgtgcgactgaccaagtaacattgatggcgtctgaagaagggggcactgagattgaagaagttgctgcgaagactcctgaaaagatcttcaaagaaactatcgatccagtaatcggactttcaccattccaagcaagacgaattgcgtttaatattaatattcctaaagaatctgttaacaaagctgctaaattcttattagcactttataatgtattcattgaaaaagattgttcaatcgtagaaatcaacccattagttacaacagctgatggtgatgtattggcattagatgctaaaattaattttgatgataatgcattattcagacataaagatgttgtagaattacgtgatttagaagaagaagatccgaaagagattgaagcgtctaaacatgatttatcatacattgcattagatggtgacatcggatgtatggttaatggtgcaggtttagccatggcaacaatggatacgattaatcatttcggtggaaacccagccaatttcttagatgcaggcggaagcgctactagagaaaaagtaactgaagcatttaaaatcattttaggtgatgaaaatgttaaaggtatttttgtaaacattttcggtggcattatgaaatgtgatgttatcgcagaaggtatcgttgaagctgtaaaagaagtagatttaactttaccactagttgtacgcctagaaggtacaaatgttgagttaggtaaaaaaatcttaaaagactcaggattagcaattgaaccagcagcaacaatggctgaaggtgcacaaaaaattgttaaactagtcaaagaagcataaggaaaggatgggagcactaagatgagtgtatttatagataagaatactaaagtaatggtacaaggtattacagggtctactgcccttttccatacaaaacaaatgcttgattatggtacgaaaatagtagcaggtgtgacgcctggtaaaggtggtcaagttgttgaaggcgttcctgttttcaacactgttgaagaagctaaaaatgaaactggggcaacggtttcagtcatttacgttccagcaccatttgctgcagactcaattttagaagcagctgatgcagacttagatatggttatttgtatcactgaacatattcctgtattagacatggttaaagttaaacgctacttacaaggtagaaaaacacgtttagttggtccgaactgtccaggtgtgattacagcagatgaatgtaaaattggtattatgcctggctatattcacaaaaaaggtcatgttggtgtagtatctcgttcaggtacattaacatatgaagcagtgcaccaattgactgaagaaggtattggtcaaactacagctgttggtattggtggagacccagtcaacggaacaaactttattgatgttttaaaagcattcaatgaagatgacgaaacgaaagcagttgttatgattggtgaaatcggtggtacggctgaagaagaagcagctgaatggattaaagcgaatatgacaaaaccagttgtaggctttatcggtggacaaacagcacctcctggaaaacgtatgggacatgctggtgcaatcatttcaggtggtaaaggtactgctgaagagaaaattaaaacattaaatagttgtggtgtgaaaacagcggcaacaccttcagaaattggttcaacattaattgaagctgctaaagaagcaggtatttatgaatcattattaactgttaataaataaagttaaaagatgatataaatggctatagcccattccatactttataaaagtatcggaaatgggctatttgtcgtgcgatgaattttagtacacttttcatattttggaaagacaagttaattattttacctcctacaatagctttataaaacaaagaaaattttaattaaaatatatagcgaactatgttataatgtttgtatattattgtaaggagtgtttcatcatgaataaacaacaaagtaaagtacgctattcaattagaaaagttagtattggaattttgtcaatttcaataggtatgtttttggcattgggtatgtcgaacaaagcatatgcagatgaaattgataaatctaaagattttacaagagggtatgagcaaaatgtattcgcgaaatcagagttaaatgctaataaaaatacgacaaaagacaaaataaaaaatgaaggtgctgttaaaacatcggacacaagtttaaagttagacaacaaatcagcaatttcaaacggaaatgaaattaatcaagatataaagatttcaaatactccgaaaaactcaagccaaggtaacaatctagttattaataacaatgaacttactaaagaaattaaaattgcaaacttggaagctcaaaattctaatcagaagaaaacgaataaagttactaataattactttggttactacagttttagagaagctccaaaaacacaaatctatactgtaaaaaaaggagacacacttagtgctatagcattaaaatacaaaactacagtttcaaatattcaaaatacaaataatatagcaaatcctaatttaatatttattggtcaaaaattaaaagtgccaatgacaccattagtagaaccaaaaccaaaaacagtgtcttcaaataataaaagtaatagtaatagcagtacattaaattatttgaaaacattagagaatagaggatgggatttcgacggtagttatggatggcaatgtttcgatttagttaatgtatattggaatcatctttatggtcatggattaaaaggatatggagctaaagatataccatatgcaaataattttaatagtgaagctaaaatttatcacaacacaccaactttcaaagctgaacctggggacttagtggtttttagtggaagatttggtggaggatatggtcatacagctattgtcttaaatggtgattatgatggaaaattaatgaagttccaaagtttagatcaaaactggaataatggtggatggcgtaaagcagaggttgcacataaagttgttcataattatgaaaatgatatgatttttattagaccatttaaaaaagcataatttaaatcgaaggcaggacattgaaatatgaaattttcaactttaagtgaagaagaatttaccaactacaccaaaaagcacttcaaacattatacacagtctatagaattatataattatagaaataaaataaatcatgaagcacatattgtgggagtgaagaatgataaaaatgaagttatagctgcatgtttattaacagaggcacgaatttttaaattctacaaatatttctactctcatagaggtcctttacttgattatttcgatgctaaattagtttgttacttttttaaagaattatctaaattcatttataaaaatagaggagtatttattcttgttgatccatatttaatagagaatttaagagatgcaaatggtaggataataaagaattataataattcagtgatagtaaagatgctagggaaaattgggtatctccatcaaggttatacaacaggatattcaaataaaagtcaaattaggtggatttctgtattggatttaaaagataaagatgagaatcaacttttaaaagaaatggaataccaaactagaagaaatataaaaaagactattgagattggtgttaaggttgaagatttatctattgaagaaacaaatcgattttataaattgtttcaaatggctgaagaaaaacatggttttcatttcatgaatgaagattattttaaacgaatgcaagaaatatataaagataaggcaatgttaaagatagcttgtataaatcttaatgaatatcaagataaattaaaaatacaattattgaaaatcgaaaatgaaatgatgactgtgaacagagcattaaatgaaaatccaaattctaaaaaaaataaatcaaaattaaatcagttaaatatgcaattatctagtattaataatagaattagtaaaaccgaagaactaatatttgaagatggacctgttttggatttagctgctgctttatttatatgtactgatgatgaagtttattatctatcaagtggatcaaatccgaaatataatcagtatatgggtgcatatcatctacaatggcatatgataaaatatgcaaaatcacataatattaataggtataatttttatggaataacaggcgtctttagtaatgaggcggatgattttggtgttcaacaatttaaaaagggttttaatgcacatgttgaagaattaattggtgatttcatcaaaccagtaagaccaattctatataaatttgcaaaacttatttataaggtttaattataaagtatgttggaaattgaaattttaaattctttccaacatacttttcactttttaagtcagtatttttactccttaaaataacattacatcgacaatgtttttgtattagaaatgtaaaacaaaaatagaatatgattttgtatgattacaaaaaggagttgatttattgattaaactatttttgcttaagttatactgggcacacttttcgactaaacaaattcatcaatttttaatggcatatcctaatgtaattaaagaggagggaagaaaaaaagatagttatttatgtgaatgggtgaatagggaagaaaatgttcatttattacgtaaatactatgcttttataaaacttgatcataacgatattattaaagaactgcagaaattaaaagtaagttacattacatatatggattctgaatacccagtgctattaaaagaaatatatcaatttccattacttcttttctataaagggaacatcaaattaataaataatatgcatcatttggcagtagtaggtgcaagagattctacaagttatacccaacagtctttagaatttttattatcaaatgataaaagcaaatatttaacaattgtttccggccttgctcaaggagctgatgcaatggcacatcaaatagctttaaaatacaatctccctacaattgcagttttagcctttggccatcaaacacattatcccaaaagtacattagcattaagaaataaaatagaagaaaaaggtttagttatatctgaatatccaccacatacaccaatcgctaaatatagatttcctgagcgcaatagaattatcagcggtttgtcaaaaggggttttaattactgaggctaaggaacaaagtggcagtcacatcacgatagattttgcattagagcaaaatagaaatgtttatgttttacctggatctatgtttaatcctatgacaaaaggtaatttattacgtatccaagaaggtgctaaggtagtattaaacgctaatgatatatttgaagactactatatttaaaactaaaaataacgagttgcttcatatttcttttgtttccctttgtaatttattttttaataaaatctataaaaaatagacagggaaaatgatttgtttagatataaaacgttgacaaaagcaaaattaagcgtttatcatttatctttagtaattagattagcgagggggaaatgacattggcagataatttagtcattgttgaatcgcctgcaaaagcaaaaaccattgaaaagtatttaggtaagaaatataaagttatagcttcaatgggacacgtcagagacttaccaagaagtcaaatgggtgtcgacactgaagataattacgaaccaaaatatataacaatacgcggaaaaggtcctgttgtaaaagaattgaaaaaacatgcaaaaaaagcgaaaaacgtctttctcgcaagtgaccccgaccgtgaaggtgaagcaattgcttggcatttatcaaaaattttagagcttgaagattctaaagaaaatcgcgttgttttcaacgaaataactaaagacgctgttaaagaaagttttaaaaatcctagagaaattgaaatgaacttagtcgatgcacaacaagcgcgtcgaatattagatagattagttggctataacatctcgccagttctttggaaaaaagtaaaaaaagggttgtcagcgggtcgagttcaatctgttgcacttcgtttagtcattgaccgtgaaaatgaaattcgaaactttaaaccagaagaatattggactattgaaggagaatttagatacaaaaaatcaaaattcaatgctaaattccttcattataaaaataaaccttttaaactaaaaacgaaaaaagatgttgagaaaattacagctgcattagatggagatcaattcgaaattacaaacgtgactaaaaaagaaaaaacgcgtaatccagcaaacccatttacaacttctacattacaacaagaggcggcacgtaaattaaactttaaagcaagaaaaacaatgatggtcgcacaacaattatatgaaggtatagatttgaaaaaacaaggtacgattggtttaataacatatatgagaaccgattctacacgtatttcagatactgccaaagttgaagcaaaacagtatataactgataaatacggtgaatcttacacttctaaacgtaaagcatcagggaaacaaggtgaccaagatgcccatgaggctattagaccttcaagtactatgcgtacgccagatgatatgaagtcatttttgacgaaagaccaataccgattatacaaattaatttgggaacgatttgttgctagtcaaatggctccagcaatacttgatacagtctcattagacataacacaaggtgacattaaatttagagcgaatggtcaaacaatcaagtttaaaggatttatgacactttatgtagaaactaaagatgatagtgatagcgaaaaggaaaataaactgcctaaattagagcaaggtgataaagtcacagcaactcaaattgaaccagctcaacactatacacaaccacctccaagatatactgaggcgagattagtaaaaacactagaagaattgaaaattgggcgaccatcaacttatgcaccgacaatagatacgattcaaaagcgtaactatgtcaaattagaaagtaagcgttttgttcctactgagttgggagaaatagttcatgaacaagtgaaagaatacttcccagagattattgatgtggaattcacagtgaatatggaaacgttacttgataagattgcagaaggcgacattacatggaggaaagtaatcgacggtttctttagtagctttaaacaagatgttgaacgtgctgaagaagagatggaaaagattgaaatcaaagatgagccagccggtgaagactgtgaaatttgtggttctcctatggttataaaaatgggacgctatggtaagttcatggcttgctcaaacttcccggattgtcgtaatacaaaagcgatagttaagtctattggtgttaaatgtccaaaatgtaatgatggtgacgtcgtagaaagaaaatctaaaaagaatcgtgtcttttatggatgttcgaaatatcctgaatgcgactttatctcttgggataagccgattggaagagattgtccaaaatgtaaccaatatcttgttgaaaataaaaaaggcaagacaacacaagtaatatgttcaaattgcgattataaagaggcagcgcagaaataatatttttatttcctagatacattttaagattgttaaatagaatcattagtgaatcttattttaaagatagtaaaggattaatctaaataagtgcggataatataaacataacaacataattaaaagacataaatgacaataaaaggagtatagaaatgactcaaactgtaaatgtaataggtgctggtcttgccggttcagaagcggcatatcaattagctgaaagaggaattaaagttaatctaatagagatgagacctgttaaacaaacaccagcgcaccatactgataaatttgcggaacttgtatgttccaattcattacgcggaaatgctttaactaatggtgtgggtgttttaaaagaagaaatgagaagattgaattctataattattgaagcggctgataaggcacgagttccagctggtggtgcattagcagttgatagacacgatttttcaggttatattactgaaacacttaaaaatcatgaaaatatcacagttattaatgaagaaattaatgccattccagatggatacacaattatcgcaacaggaccacttactacagaaacccttgcgcaagaaatagtggacattactggtaaagatcaactttatttctatgatgcggctgctccaattattgaaaaagaatctattgatatggataaagtttacttaaagtcccgttatgataaaggtgaagctgcatatttaaactgtcctatgactgaggatgaatttaatcgcttttatgatgcagtattagaagctgaagttgcgcctgtaaattcatttgaaaaagaaaaatatttcgagggttgtatgccttttgaagtaatggcagaacgcggacgcaagacattactatttggaccaatgaaaccagtaggattagaagatccaaagactgggaaacgtccttatgcggtggttcaattaagacaagatgacgctgctggtacactctacaatattgttggcttccaaacgcatttaaaatggggagctcaaaaagaagtcattaaattaattccaggcttagaaaatgttgatattgttagatatggtgtgatgcatagaaataccttcattaattcaccggacgtattaaacgagaaatatgaattgatttcacaaccaaacatacagtttgcgggacaaatgactggtgttgaaggttatgtagaaagcgcagctagcggcttagttgcaggtatcaatcttgcgcataaaatattaggcaagggtgaggtagtatttccgagagaaacaatgattggaagtatggcttactatatttctcatgctaaaaacaataagaatttccaacctatgaatgctaacttcgggttattaccatctttagaaactagaattaaagataaaaaagaacgctatgaagcacaagctaatagagctttggattacttagaaaatttcaaaaaaactttataaaatagttagaaagactagatatgctattcattcttaagtcatcaacgagtaagtaatgactttctaaatggaaaatacttatcctagtctttttaattttggaattgttacgtatttctgacaatttagaattcgcattcaaaaaatatctaaataaataacacgcaataagttgattgatgtaacatgtaagagaatgttttaaataaactttatttaaaaggcaatgaaataataaatggcaaggctattaataaagacttttagtaattaatttaaaaaagaggtattctaattaacaggttttccgattagttacaattatttaattctcaaaagatttagaattgattatcaaattactgtaagccctttgctgtatatgctacaattcttattgatggagggtaaatgtattgaatcatattcaagatgcgtttttaaatacattgaaagttgaacggaatttttcggaacacacattgaaatcatatcaagatgacttaattcagtttaatcaatttttagaacaagaacatttagagttgaatacttttgaatacagagatgctagaaattatttgagctatttatattcaaatcatttgaaaagaacatctgtttctcgtaaaatctcaacgttaagaactttctatgaatattggatgacgcttgatgagaacattattaatccatttgttcaattagtacatccgaaaaaagaaaaatatcttccgcaattcttttacgaagaagaaatggaagcgttattcaaaactgtagaagaggacacttcaaaaaatttacgggatcgagttattcttgaattgttgtatgctacaggcatccgtgtttcggaattagtaaatattaaaaaacaagatatagatttttacgcgaatggtgttaccgtattaggaaaagggagcaaagagcgctttgtaccgtttggtgcttattgtagacaaagcatcgaaaattatttagaacatttcaaaccaattcagtcatgcaatcatgattttcttattgtaaatatgaagggtgaagcaatcactgaacgcggtgtacgatatgttttaaatgatattgttaaacgaacagcaggcgtaagtgagattcatccccacaagctcagacatacatttgcaacgcatttattgaatcaaggtgcagacctaagaacagtacaatcgttattaggtcatgttaatttgtcaacaactggtaaatatacacacgtatctaaccaacaattaagaaaagtgtatctaaatgcacatcctcgagcgaaaaaggagaatgaaacatgagtaatacaacattacatgcaacaacaatttatgctgtaagacataatgggaaagcagctatggctggagatgggcaagtaacgcttggtcaacaagtcatcatgaaacaaacggcaagaaaagtgcgacgtttatatgaaggtaaagtgttagctggtttcgcaggtagtgtagcagatgcgtttacgttatttgaaaaattcgaaacaaaattacaacagtttagtggtaacttagaaagagctgctgttgaattggcacaagaatggcgaggcgataaacaattacgtcaattagaagctatgctaattgtaatggataaagatgctattttagttgtcagtggaactggcgaagttattgctccagatgatgaccttatcgctattggatcaggaggcaactacgcattaagcgcaggacgtgcattgaaacgccatgcatcgcatttgtctgctgaagaaatggcatatgagagcttgaaagtagcggctgatatttgtgtctttaccaacgataatattgttgtcgaaacactataataatcagagcacgataaataattacgagcaattaattttagttaaaagacggaggaatgaaattaatggatacagctggaataagattaactccaaaagaaatcgtatctaaattaaatgaatacatcgttggacaaaatgatgctaaacgtaaagtggcaattgccctacgtaatcgatacagaagaagtttattagatgaggaatcaaagcaagaaatttcacctaaaaatattttgatgattggaccaaccggcgttggtaaaactgaaattgcaagaagaatggccaaagttgtcggcgcgccatttataaaagtagaagctactaaatttactgaggtaggttatgtaggacgagatgttgaaagtatggttagagatcttgttgatgtttcagtaagattagtcaaggcgcagaaaaaatcattggtacaagatgaagcaacagctaaggccaatgaaaaacttgttaagttattagttccaagtatgaaaaagaaagcgtctcaaacgaataatcctttagagtcacttttcggaggtgcaattccaaatttcggacaaaataacgaagatgaagaagaaccacctactgaggaaattaaaacaaaacgttctgaaattaagagacagctagaagaaggcaaacttgaaaaagaaaaggtaagaattaaagtcgaacaagatcctggtgctttaggtatgctaggtacaaatcaaaatcagcaaatgcaagagatgatgaatcaattaatgcctaaaaagaaagttgagcgagaagttgctgttgagacggcaaggaaaatcttagctgatagttatgcggatgaactaattgatcaagaaagcgctaaccaagaagcgcttgaattagcagaacaaatgggtatcatctttatagatgaaatcgacaaagttgcgacgaataatcataatagtggtcaagatgtctcaagacaaggtgttcaaagagatattttacctatacttgaaggtagcgttattcaaaccaaatatggtactgtgaatactgaacatatgctgtttataggtgctggagctttccatgtatctaagccgagtgacttgataccagaattgcaaggtcgttttccgattagagttgaacttgatagtttatcggtagaagattttgtaagaattttgacagaaccaaaattgtcattaattaaacaatatgaagcattgcttcaaacagaagaagttactgtaaactttaccgatgaagcaattactcgcttagctgagattgcttatcaagtaaatcaagatacagacaacattggtgcacgtcgacttcatacaattttagaaaagatgctagaagatttatcattcgaagcaccaagtatgccgaatgcagttgtagatattaccccacaatatgttgatgataaattaaaatcaatttcaacaaataaagatttaagtgcatttattctataaaaatatacaaaaggagaaaaattcatgagcttattatctaaaacgagagagttaaacacgttacttcaaaaacacaaaggtattgcggttgattttaaagatgtagcacaaacgattagtagcgtaactgtaacaaatgtatttattgtatcgcgtcgaggtaaaattttaggatcgagtctaaatgaattattaaaaagtcaaagaattattcaaatgttggaagaaagacatattccaagtgaatatacagaacgattaatggaagttaaacaaacagaatcaaatattgatatcgacaatgtattaacagtattcccacctgaaaacagagaattattcatagatagtcgtacaactatcttcccaattttaggtggaggggaaagattaggtacattagtacttggtcgagtacatgatgattttaatgaaaatgatttggtactaggtgaatatgctgctacagttattggtatggaaatcttacgtgagaagcatagtgaagtagaaaaagaagcgcgcgataaagctgctattacaatggcaattaattcattatcttattctgaaaaagaagcgattgaacatatctttgaagaacttggcggtacggaaggcctattaatcgcatcaaaagttgcagatagagttggtattactagatctgtaattgtaaatgcactacgtaaattagaaagtgctggtgtaattgaatcacgttctttaggaatgaaaggtactttcattaaagttaaaaaagaaaaattcttagatgaattagaaaaaagtaaataagtcgatgagtctgggacataattcaatgtcctagtcgtgacgatgttatcttggcggtagtcaatgaaatgactttgatgattatgttgaagtcatttctttatttttgtctaattttcaatcaaattgatatttcacattaacttgatagaattacctttaaatttatggaaaaatgcttgaaaaacatttgctttagacacggcattatgttatatttattttcggctataaagccaatacacacatatcaaacgtgattgtgtaaagggtgcaatatttatatattgtctttacaatagtttgctatggaggtaattaaccaataggaggaatttataatggcagtaatttcaatgaaacaattactagaagcgggtgttcacttcggtcaccaaacacgtcgttggaacccaaaaatgaaaaaatatatcttcactgagagaaatggtatttatatcatcgacttacaaaaaacagtgaaaaaagtagacgaggcatacaacttcttgaaacaagtttcagaagatggtggacaagtcttattcgtaggaactaaaaaacaagcacaagaatcagttaaatctgaagcagaacgtgctggtcaattctacattaaccaaagatggttaggtggattattaactaactataaaacgatctcaaaacgaatcaaacgtatttctgaaattgaaaaaatggaagaagatggtttattcgaagtattacctaaaaaagaagtagtagaacttaaaaaagaatacgaccgtttaatcaaattcttaggcggaattcgtgatatgaaatcaatgcctcaagcattattcgtagttgacccacgtaaagagcgtaatgcaattgctgaagctcgtaaattaaatattcctatcgtaggtatcgttgacactaactgtgatcctgacgaaattgactacgttatcccagcaaacgacgatgctatccgtgcggttaaattattaactgctaaaatggcagatgcaatcttagaaggtcaacaaggcgtttctaatgaagaagtagctgcagaacaaaacatcgatttagatgaaaaagaaaaatcagaagaaacagaagcaactgaagaataatcaactgttgaatctgacttagatatagtttaaatgggtgataagatattaatgcttatcaccttttttaaaaagaaaatcgaggcaaattacaaatattcaattagagtattggcaatcttgcctataataatgctaaaatcataatatataaaatgataacttattggaggaataatgaatggcaactatttcagcaaaacttgttaaagaattacgtgaaaaaactggcgcgggtatgatggattgtaaaaaagcgctaactgaaactgatggtgacatcgataaagcgattgactacctacgtgaaaaaggtattgctaaagcagctaaaaaagcagaccgtattgcggctgaaggtttagtacatgtagaaactaaaggtaacgacgcagttatcgttgaaatcaactctgaaacagactttgttgctcgtaacgaaggtttccaagagttagttaaagaaatcgctaatcaagtattagatacaaaagctgaaactgttgaagctttaatggaaacaactttaccaaatggtaaatcagttgatgaaagaattaaagaagcaatttcaacaatcggtgaaaaattaagtgttcgtcgttttgctatcagaactaaaactgataacgatgctttcggcgcttacttacacatgggtggacgcattggtgtattaacagttgttgaaggttcaactgacgaagaagcagcaagagacgttgctatgcatatcgctgcaatcaaccctaaatatgtttcttctgaacaagttagcgaagaagaaatcaaccacgaaagagaagttttaaaacaacaagcattaaatgaaggtaaaccagaaaacatcgttgaaaaaatggtggaaggacgtttacgtaaatacttacaagaaatttgtgctgtagatcaagacttcgttaaaaaccctgatgtaacagttgaagctttcttaaaaacaaaaggtggaaaacttgttgacttcgtacgctatgaagtaggcgaaggtatggaaaaacgcgaagaaaactttgcggatgaagttaaaggacaaatgaaataatctgtcataaagtaaaacaaggaagaagacacctttaatgttgctttattaaaatgtaaatcattctaataaaacgacaactgtgtcttctttacttgtatatgttacatatattcacgatagagaggataagaaaatggctcaaatttctaaatataaacgtgtagttttgaaactaagtggtgaagcgttagctggagaaaaaggatttggcataaatccagtaattattaaaagtgttgctgagcaagtggctgaagttgctaaaatggactgtgaaatcgcagtaatcgttggtggcggaaacatttggagaggtaaaacaggtagtgacttaggtatggaccgtggaactgctgattacatgggtatgcttgcaactgtaatgaatgccttagcattacaagatagtttagaacaattggattgtgatacacgagtattaacatctattgaaatgaagcaagtggctgaaccttatattcgtcgtcgtgcaattagacacttagaaaagaaacgcgtagttatttttgctgcaggtattggaaacccatacttctctacagatactacagcggcattacgtgctgcagaagttgaagcagatgttattttaatgggcaaaaataatgtagatggtgtatattctgcagatcctaaagtaaacaaagatgcggtaaaatatgaacatttaacgcatattcaaatgcttcaagaaggtttacaagtaatggattcaacagcatcctcattctgtatggataataacattccgttaactgttttctctattatggaagaaggaaatattaaacgtgctgttatgggtgaaaagataggtacgttaattacaaaataaatttagaggtgtaaaataatgagtgacattattaatgaaactaaatcaagaatgcaaaaatcaatcgaaagcttatcacgtgaattagctaacatcagtgcaggaagagctaattcaaatttattaaacggcgtaacagttgattactatggtgcaccaacacctgtacaacaattagcaagcatcaatgttccagaagcacgtttacttgttatttctccatacgacaaaacttctgtagctgacatcgaaaaagcgataatagcagctaacttaggtgttaacccaacaagtgatggtgaagtgatacgtattgctgtacctgccttaacagaagaacgtagaaaagagcgcgttaaagatgttaagaaaattggtgaagaagctaaagtatctgttcgaaatattcgtcgtgatatgaatgatcagttgaaaaaagatgaaaaaaatggcgacattactgaagatgagttgagaagtggtactgaagatgttcagaaagcaacagacaattcaataaaagaaattgatcaaatgattgctgataaagaaaaagatattatgtcagtataaaactaatatacaatgacatattaaaatgccagtattaaacgataatgtaacatttaaaatgggcatgtttaattaaatcaaagatgcatgtgataatttaaattcacaatgagcataaaaatggtgtttaaacaagttaattaaacatatactttataaataataggcattaggtatattgctataataaagttatgtaatttttaacctcagtatgtatgtcacatttctggtgtaaactgtaccgagtcagactttggtacagtttttttatttgcttattcaatgcattaaatgagtatgataaaatgataatgattgtttagtaacttatactatatgacagagatgatcaggctcggaggaaagaccatgtttaaaaagctaataaataaaaagaacactataaataattataatgaagaattagactcgtctaatatacctgaacatatcgctattattatggatggtaatgggcgatgggctaagaagcgaaaaatgcctagaattaaaggtcattacgaaggtatgcaaacaataaaaaaaattactagggtagctagtgatattggtgttaagtacttaactttatacgccttttccactgaaaattggtcaagacctgaaagtgaagtaaattatattatgaatttgcctgtcaatttcttaaagacattcttaccggaactaattgaaaaaaatgtcaaagttgaaacaattggatttactgataagttgccaaaatcaacgatagaagcaattaataatgctaaagaaaagacagctaataataccggcttaaaattaatatttgcaattaattatggtggcagagcagaacttgttcatagtattaaaaatatgtttgacgagcttcatcaacaaggtttaaatagtgatatcatagatgaaacatatataaacaatcatttaatgacaaaagactatcctgatccagagttgttaattcgtacttcaggagaacaaagaataagtaatttcttgatttggcaagtttcgtatagtgaatttatctttaatcaaaaattatggcctgactttgacgaagatgaattaattaaatgtataaaaatttatcagtcacgtcaaagacgctttggcggattgagtgaggagtagtatagtatgaaagttagaacgctgacagctattattgccttaatcgtattcttgcctatcttgttaaaaggcggccttgtgttaatgatatttgctaatatattagcattgattgcattaaaagaattgttgaatatgaatatgattaaatttgtttcagttcctggtttaattagtgcagttggtcttatcatcattatgttgccacaacatgcagggccatgggtacaagtaattcaattaaaaagtttaattgcaatgagctttattgtattaagttatactgtcttatctaaaaacagatttagttttatggatgctgcattttgcttaatgtctgtggcttatgtaggcattggttttatgttcttttatgaaacgagatcagaaggattacattacatattatatgcctttttaattgtttggcttacagatacaggggcttacttgtttggtaaaatgatgggtaaacataagctttggccagtaataagtccgaataaaacaatcgaaggattcataggtggcttgttctgtagtttgatagtaccacttgcaatgttatattttgtagatttcaatatgaatgtatggatattacttggagtgacattgattttaagtttatttggtcaattaggtgatttagtggaatcaggatttaagcgtcatttcggcgttaaagactcaggtcgaatactacctggacacggtggtattttagaccgatttgacagctttatgtttgtgttaccattattaaatattttattaatacaatcttaatgctgagaacaaatcaataaacgtaaagaggagttgctgagataatttaatgaatctcagaactccttttgaaaattatacgcaatattaactttgaaaattagacgttatattttgtgatttgtcagtatcatattataatgacttatgttacgtatacagcaatcatttttaaaataaaagaaatttataaacaatcgaggtgtagcgagtgagctatttagttacaataattgcatttattattgtttttggtgtactagtaactgttcatgaatatggccatatgttttttgcgaaaagagcaggcattatgtgtccagaatttgcgatcggtatggggccaaaaatttttagttttagaaaaaatgaaacactttacactattaggttattgcctgttggtggatatgttcgtatggcaggagatggcttagaagagccaccagtcgagcccggtatgaacgttaaaattaaacttaatgaagaaaatgaaataacacatatcatattagatgatcatcataagtttcaacaaattgaagcgatcgaagttaaaaaatgtgattttaaggatgacttattcatagaaggtatcactgcttatgataatgaaagacatcattttaaaattgctagaaagtctttctttgttgaaaatggtagcttagttcaaattgctccgagagacagacaatttgcacataaaaagccatggccgaaatttttaacattatttgcgggaccgttatttaactttatattagctttagtcctatttattggtcttgcatattatcaaggcacgcctacgtctactgtagaacaagtcgcagataagtatccagctcaacaagcaggattacaaaaaggtgataagatcgtccaaattggcaaatataaaatatctgaatttgatgatgttgataaggcgttagataaagttaaagataataagacgactgttaaatttgaacgtgatggtaaaacaaagtcagttgaattaacacctaaaaagactgaaaaaaaactgactaaagtaagttcagagacgaagtatgttctcggattccaaccagcgagtgaacatacactttttaaaccaattgtattcggatttaaaagctttttaatcggtagtacttatatttttacagctgtagtaggtatgttggctagtatatttacgggcggattctcatttgatatgttaaatggtccggttggtatttatcataacgtcgactcagttgttaaagcgggtatcattagcttaattggttacactgcgttattaagtgtaaacttaggtattatgaatttaattcctattcctgcactagacggtggtcgtattttatttgttatatatgaagcgattttcagaaaaccagttaataaaaaagcggaaacaacgattattgctattggtgccattttcatggtcgttataatgatattagtaacgtggaatgatattcgacgatatttcttataatttaggaggataaataattatgaagcaatccaaagtttttataccaacgatgcgtgacgtgccatcagaagcagaagcacaaagtcatcgtttattattgaaatcgggtttgataaaacaaagtacaagtgggatttatagttatttaccgctagcaacacgtgtgttaaataatattactgcaattgtgcgacaagaaatggaacgtatcgattctgttgaaattttaatgccagcgttacaacaagctgaattatgggaagaatcaggacgttggggtgcatatggcccagaattaatgcgtttacaagatagacatggaagacaatttgcattaggtccaacacatgaagaattagttacatcaatagtaagaaatgaattgaaatcatacaaacaattaccgatgacattattccaaattcaatctaaattccgtgatgaaaagagaccacgttttggtttacttcgtgggcgtgaatttattatgaaagatgcatattcattccatgctgacgaggcatcattagatcaaacgtatcaagatatgtatcaagcgtatagccgtatttttgagagagttggcattaacgcaagaccagtagttgcagattcaggtgctataggcggtagccatacacatgaatttatggcattaagtgctatcggtgaggatacaatcgtttacagtaaagaaagtgattatgctgctaacatcgaaaaagcagaagtcgtttacgaaccaaatcataagcatactactgtgcaacctttagaaaaaattgaaacaccaaatgttaagactgcgcaagaattggcagacttcttaggtagaccagtagatgaaatcgttaaaacgatgattttcaaagttgatggcgaatatattatggttttagtgcgtggccatcatgaaattaatgacattaaattaaaatcttatttcggcacagataatattgaattagcaacacaagacgaaattgttaatttagttggtgcaaatcctggttcactaggtcctgtaattgataaagaaatcaaaatttatgcagataattttgtgcaagatttaaataatttagttgtcggtgctaacgaagatggttatcacttaattaatgtaaatgtaggtagagacttcaacgttgatgaatatggcgatttccgttttattttagaaggcgaaaagttaagtgatggttcaggcgttgcacattttgctgaaggtattgaagttggtcaagtattcaaattgggtactaagtattcagaatcaatgaatgctacattcttagataaccaaggaaaagctcaatctttaattatgggttgttacggaattggaatttctagaacgctaagtgcgattgttgaacaaaatcacgatgataatggaattgtttggcctaaatcagttactccgtttgatttacatttaatttctattaatcctaagaaagatgatcaacgagaactagcagatgcactatatgctgaatttaatactaaatttgatgtgttgtacgatgatcgtcaggaacgtgcaggtgttaaatttaatgatgccgatttaattggtttaccactgcgaattgttgttggtaaacgtgcatcggaaggtattgtagaagttaaagaacgtttaacaggtgatagcgaagaagttcacattgatgacttaatgactgtcattacaaataaatatgataacttaaaataattaagatcgaatgaattataagagtaggaaaaagctgaaagaaatctgatgcttatgtcctgctcttattatttttgatataatgattattcgatgaaaaatgactgaagacatagtataattaaagataaatttgttttaacaatataatgattagccaaatataaagcatttaattttctatcattactatgctcacataatctaaatattgttcgaacacgtaaaagtaatttctatttaaggtggtaattgtcttggcaatgacagagcaacaaaaatttaaagtgcttgctgatcaaattaaaatttcaaatcaattagatgctgaaattttaaattcaggtgaactgacacgtatagatgtttctaacaaaaacagaacatgggaatttcatattacattaccacaattcttagctcatgaagattatttattatttataaatgcaatagagcaagagtttaaagatatcgccaacgttacatgtcgttttacggtaacaaatggcacgaatcaagatgaacatgcaattaaatactttgggcactgtattgaccaaacagctttatctccaaaagttaaaggtcaattgaaacagaaaaagcttattatgtctggaaaagtattaaaagtaatggtatcaaatgacattgaacgtaatcattttgataaggcatgtaatggaagtcttatcaaagcgtttagaaattgtggttttgatatcgataaaatcatattcgaaacaaatgataatgatcaagaacaaaacttagcttctttagaagcacatattcaagaagaagacgaacaaagtgcacgattggcaacagagaaacttgaaaaaatgaaagctgaaaaagcgaaacaacaagataacaacgaaagtgctgtcggtaagtgtcaaattggtaagccgattcaaattgaaaatattaaaccaattgaatctattattgaggaagagtttaaagttgcaatagagggtgtcatttttgatataaacttaaaagaacttaaaagtggtcgccatatcgtagaaattaaagtgactgactatacggactctttagttttaaaaatgtttactcgtaaaaacaaagatgatttagaacattttaaagcgctaagtgttggtaaatgggttagggctcaaggtcgtattgaagaagatacatttattagagatttagttatgatgatgtctgatattgaagagattaaaaaagcgacaaaaaaagataaggctgaagaaaagcgtgtagaattccacttgcatactgcaatgagccaaatggatggtatacccaatattggtgcgtatgttaaacaggcagcagactggggacatccagccattgcggttacagaccataatgttgtgcaagcatttccagatgctcacgcagcagcggaaaaacatggcattaaaatgatatacggtatggaaggtatgttagttgatgatggtgttccgattgcatacaaaccacaagatgtcgtattaaaagatgctacttatgttgtgttcgacgttgagacaactggtttatcaaatcagtatgataaaatcatcgagcttgcagctgtgaaagttcataacggtgaaatcatcgataagtttgaaaggtttagtaatccgcatgaacgattatcggaaacgattatcaatttgacgcatattactgatgatatgttagtagatgcccctgagattgaagaagtacttacagagtttaaagaatgggttggcgatgcgatattcgtagcgcataatgcttcgtttgatatgggcttcatcgatacgggatatgaacgtcttgggtttggaccatcaacgaatggtgttatcgatactttagaattatctcgtacgattaatactgaatatggtaaacatggtttgaatttcttggctaaaaaatatggcgtagaattaacgcaacatcaccgtgccatttatgatacagaagcaacagcttacattttcataaaaatggttcaacaaatgaaagaattaggcgtattaaatcataacgaaatcaacaaaaaactcagtaatgaagatgcatataaacgtgcaagacctagtcatgtcacattaattgtacaaaaccaacaaggtcttaaaaatctatttaaaattgtaagtgcatcattggtgaagtatttctaccgtacacctcgaattccacgttcattgttagatgaatatcgtgagggattattggtaggtacagcgtgtgatgaaggtgaattatttacggcagttatgcagaaggaccagagtcaagttgaaaaaattgccaaatattatgattttattgaaattcaaccaccggcactttatcaagatttaattgatagagagcttattagagatactgaaacattacatgaaatttatcaacgtttaatacatgcaggtgacacagcgggtatacctgttattgcgacaggaaatgcacactatttgtttgaacatgatggtatcgcacgtaaaattttaatagcatcacaacccggcaatccacttaatcgctcaactttaccggaagcacattttagaactacagatgaaatgttaaacgagtttcattttttaggtgaagaaaaagcgcatgaaattgttgtgaaaaatacaaacgaattagcagatcgaattgaacgtgttgttcctattaaagatgaattatacacaccgcgtatggaaggtgctaacgaagaaattagagaactaagttatgcaaatgcgcgtaaactgtatggtgaagacctgcctcaaatcgtaattgatcgattagaaaaagaattaaaaagtattatcggtaatggatttgcggtaatttacttaatttcgcaacgtttagttaaaaaatcattagatgatggatacttagttggttcccgtggttcagtaggttctagttttgtagcgacaatgactgagattactgaagtaaacccgttaccgccacactatatttgtccgaactgtaaaacgagtgaatttttcaatgatggttcagtaggatcaggatttgatttacctgataagacgtgtgaaacttgtggagcgccacttattaaagaaggacaagatattccgtttgaaacatttttaggatttaagggagataaagttcctgatatcgacttaaactttagtggtgaatatcaaccgaatgcccataactacacaaaagtattatttggtgaggataaagtattccgtgcaggtacaattggtactgttgctgaaaagactgcttttggttatgttaaaggttatttgaatgatcaaggtatccacaaaagaggtgctgaaatagatcgactcgttaaaggatgtacaggtgttaaacgtacaactggacagcatccagggggtattattgtagtacctgattacatggatatttatgattttacgccgatacaatatcctgccgatgatcaaaattcagcatggatgacgacacattttgatttccattctattcatgataatgtattaaaacttgatatacttggacacgatgatccaacaatgattcgtatgcttcaagatttatcaggaattgatccaaaaacaatacctgtagatgataaagaagttatgcagatatttagtacacctgaaagtttgggtgttactgaagatgaaattttatgtaaaacaggtacatttggggtaccagaattcggtacaggattcgtgcgtcaaatgttagaagatacaaagccaacaacattttctgaattagttcaaatctcaggattatctcatggtacagatgtgtggttaggcaatgctcaagaattaattaaaaccggtatatgtgatttatcaagtgtaattggttgtcgtgatgatatcatggtttatttaatgtatgctggtttagaaccatcaatggcttttaaaataatggagtcagtacgtaaaggtaaaggtttaactgaagaaatgattgaaacgatgaaagaaaatgaagtgccagattggtatttagattcatgtcttaaaattaagtacatgttccctaaagcccatgcagcagcatacgttttaatggcagtacgtatcgcatatttcaaagtacatcatccactttattactatgcatcttactttacaattcgtgcgtcagactttgatttaatcacgatgattaaagataaaacaagcattcgaaatactgtaaaagacatgtattctcgctatatggatctaggtaaaaaagaaaaagacgtattaacagtcttggaaattatgaatgaaatggcgcatcgaggttatcgaatgcaaccgattagtttagaaaagagtcaggcgttcgaatttatcattgaaggcgatacacttattccgccgttcatatcagtgcctgggcttggcgaaaacgttgcgaaacgaattgttgaagctcgtgacgatggcccatttttatcaaaagaagatttaaacaaaaaagctggattatctcagaaaattattgagtatttagatgagttaggctcattaccgaatttaccagataaagctcaactttcgatatttgatatgtaaaatgaaataatcaaggtatttatttaatgcgtatggcgtagtcaaagaaatacaaaattgttgctggacacaaaattatgcccgtatttcttttcaatgtcttacgagtctattcaaatgtaatggtgaaataaaggaacaaacttttacaagaatctctgattaatagtgaagtcatttgtttcaagcataaacttatgctataattaagttgcttaaaaattagtgaactcaggcagaagagtgggagattcccgctcttttctatttgccaaaaagggaggcctgtatgagtaaaattacagaacaagtagaagtgattgttaaaccaattatggaagacttgaattttgaacttgtagacgttgaatatgtcaaagagggtagagatcattttcttagaatctctattgataaagaaggtggcgtagatttaaatgattgtacgctagcttctgaaaaaataagtgaagctatggatgcaaatgatcctattcctgaaatgtattatttagacgtagcgtcacctggtgcagaacgtccaattaaaaaagaacaagatttccaaaatgcaataactaaacctgtatttgtttctttatatgtaccaattgaaggtgaaaaggaatggttaggcattttacaagaagtcaataatgaaacaattgtagtacaagttaaaatcaaagcaagaacgaaagatatagagataccgagagacaaaatagcaaaagcacgtcacgcagttatgatttaacgtgatgaggaggaaaaaacgtgtcaagtaatgaattattattagctactgagtatttagaaaaagaaaagaagattcctagagcagtattaattgatgctattgaagcagctttaattactgcatacaaaaagaattatgatagtgcaagaaatgtccgtgtggaattaaatatggatcaaggtactttcaaagttatcgctcgtaaagatgttgttgaagaagtatttgacgacagagatgaagtggatttaagtacagcgcttgttaaaaaccctgcatatgaaattggtgatatatacgaagaagatgtaacacctaaagattttggtcgtgtaggtgctcaagcagcgaaacaagcagtaatgcaacgtcttcgtgatgctgaacgtgaaattttatttgaagaatttatagacaaagaagaagacatacttactggaattattgaccgtgttgaccatcgttatgtatatgtgaatttaggtcgtatcgaagctgttttatctgaagcagaaagaagtcctaacgaaaaatatattcctaacgaacgtatcaaagtatatgttaacaaagtggaacaaacgacaaaaggtcctcaaatctatgtttctcgtagccatccaggtttattaaaacgtttatttgaacaagaagttccagaaatttacgatggtactgtaattgttaaatcagtagcacgtgaagctggcgatcgctctaaaattagtgtcttctctgaaaacaatgatatagatgctgttggtgcatgtgttggtgctaaaggcgcacgtgttgaagctgttgttgaagagctaggtggtgaaaaaatcgacatcgttcaatggaatgaagatccaaaagtatttgtaaaaaatgctttaagcccttctcaagttttagaagttattgttgatgaaacaaatcaatctacagtagttgttgttcctgattatcaattgtcattagcgattggtaaaagaggacaaaacgcacgtctagctgctaaattaaccggctggaaaattgatattaaatcagaaacagatgcgcgtgaagcgggtatctatccagtagttgaagctgaaaaagtaactgaagaagatgttgctttagaagatgctgacacaacagaatcaaccgaagaggtaaatgatgtttcagttgaaacaaatgtagagaaagaatctgaataataggttggagtgaagtatctatgaaaaagaaaaaaattccgatgcgaaaatgtattctttcaaatgaaatgcatcccaaaaaagatatgattcgtgttgttgttaataaagaaggcgaaatctttgcggatgttactggaaagaaacaaggccgtggcgcatatgtttctaaagatgttgctatggttgaaaaagcacaacaaaaagaaattttagaaaaatattttaaagcatctaaagagcaattggatcctgtttacaaagaaattattagattaatttatagagaagagatcccaaaatgagtatagatcaaatattaaactttttaggattagcaatgagagctggtaaagtaaaaacaggtgaatcagtcattgttaatgagattaaaaaaggaaatttgaagctcgttattgttgcaaatgatgcgtctgataatacagctaaattaattacagataaatgtaagagttacaaagttccattcagaaagtttggaaatcgaaatgaattgggaatagcacttggaaaaggtgagcgtgttaatgtagggattactgacccaggctttgctaaaaagttgctatcaatgatagatgaatatcataaggagtgattatatgagtaaacaaagaatttacgaatatgcaaaagaattaaatctaaagagtaaagagattatagatgagttaaaaagcatgaatattgaggtttcaaatcatatgcaagctttggaagatgaccaaattaaagcattagataaaaagttcaaaaaagaacaaaagaacgacaataaacaaagcactcaaaataatcaccaaaaatcaaacaatcaaaaccaaaataaagggcaacaaaaagataacaaaaagaatcaacaacaaaataataaaggcaacaaaggcaataaaaagaataatagaaataataagaaaaataacaagaataataaaccacaaaatcaaccagctgctccaaaagaaataccatcaaaagtgacatatcaagaaggtattacagtaggcgaatttgcggataaattaaatgttgaatcatcagaaattatcaaaaaattattcttacttggtattgttgctaatatcaatcaatcattaaatcaagaaacaatcgaattaattgccgatgattatggcgttgaggttgaagaagaagttgtgattaatgaagaagacttatcaatctatttcgaagacgaaaaagatgatccagaggcaattgagagaccagcagttgtaacaattatgggacatgttgaccatggtaaaacgactttattagattcaattcgtcatacaaaagttacagcaggtgaagcaggcggaatcactcaacatattggtgcatatcaaattgaaaacgatggcaaaaaaatcactttcttagatacaccgggacatgctgcatttacaacgatgcgtgcgcgtggtgcacaagtaacagatattactattttagtagtagcagctgacgatggtgttatgccacaaacaattgaagcaattaaccatgctaaagaagcagaagtaccaattattgttgcagtaaataaaattgataaaccaacttcaaatcctgatcgagttatgcaagaattaactgaatatggtttaattcctgaagattggggcggcgaaacaattttcgttccactttctgcattaagtggtgatggtatcgacgatttattagaaatgataggattagttgcagaagttcaagaacttaaagcaaatcctaaaaaccgtgctgttggtacagttatcgaagctgaattagataaatcacgtggtccttctgcatcattattagtacaaaacggtacattaaatgttggtgatgcgattgtagttggtaatacatacggccgtatccgtgcaatggttaatgacttaggtcaaagaatcaaaacggctggtccatcaacgcctgttgaaattacaggtattaatgatgtgccacaagctggggatcgctttgttgtatttagtgatgaaaaacaagctcgtcgtattggtgaatcaagacacgaagctagcattatacaacaacgtcaagaaagtaaaaatgtttcattagataacctgtttgaacaaatgaaacaaggtgaaatgaaagatttaaacgttattattaaaggtgatgttcaaggttctgttgaagctttagctgcatcattaatgaaaattgatgttgaaggcgtaaatgttcgtatcattcatacagcggttggtgcaattaatgagtcagacgtgacacttgctaatgcctcaaatggtattatcattggtttcaatgttcgtccagacagtggtgcaaaacgtgctgcagaagctgaaaatgttgatatgcgtttacacagagttatttataatgttatcgaagaaattgaatcagcgatgaaaggtttacttgatccagaatttgaagaacaagttatcggacaagctgaagttcgtcaaacattcaaagtttctaaagttggtactattgctggatgttatgttactgaaggtaaaattacgcgaaatgctggtgtacgtattattcgtgatggtattgttcaatatgaaggcgaattagatacacttaaacgtttcaaagatgatgctaaggaagttgcaaaaggttatgaatgtggtattacaattgaaaactacaatgaccttaaagaaggcgatgttatcgaagcatttgaaatggttgaaattaagcgttaattaaataaattacaagctaaaagtatagttaagattgatatgctccctataaatattgcactttttaagtgtctactttatagggagcatatttgatactagcttttggttttttattagaatagattacctattaaaagttacgttatatggacatgattttgtataaaattttgtggtggcctagaatgatttttaatgacaaaatataatgtcgactattattggaaaattttctgttgaaatgcctatcttacggcaaactttatttgattttataggcttaatttattaaaataacgtgtgagctaaaataattgtttaagcattgttacactaaaaaatgcaaataacaattgaacttaaagataaagaggtgacaagaatgagcagtatgagagcagagcgtgttggtgaacaaatgaagaaggaattaatggatatcatcaacaataaagtcaaagatcctcgagttggttttattacaattacagatgttgttttaacaaatgatttatcgcaggctaaagtatttttaactgtattaggtaacgataaagaagtagaaaatacatttaaagcacttgataaagcaaaaggcttcattaagtctgaattaggttctagaatgcgattacgtattatgccggaattaatgtatgaatatgatcaatcaatcgaatatggtaataaaattgaacgaatgattcaagatttacacaaacaagatagataatttagtgttaggtatctggaaaatgtttgataatttcttaatatcggtatattaacattaaacagttaatacatagatgtgtagaaatagttaacattttccagtttttttatgaataaatttagttgatacgctattaaaatatattttaaaaaagaaggtgactatatgtataatgggatattaccagtatataaagagcgcggtttaacaagtcatgacgttgtattcaaattgcgtaaaatattaaaaactaaaaaaataggtcacacgggtacgcttgatcccgaagttgcaggcgtgttaccggtatgtataggtaatgcaacgagagttagtgattatgttatggatatgggcaaagcttatgaagcaactgtatcgataggaagaagtacaacgactgaagatcaaacgggtgatacattggaaacaaaaggtgtacactcagcagattttaataaggacgatattgaccgattgttagaaagttttaaaggtatcattgaacaaattccgccgatgtactcatccgtcaaagtaaatggtaaaaaattatatgaatatgcgcgtaataatgaaacagttgaaagaccaaagcgtaaagttaatattaaagacattgggcgtatatctgaattagattttaaagaaaatgagtgtcattttaaaatacgcgtcatctgtggtaaaggtacatatattagaacgctagcaactgatattggtgtgaaattaggctttccggcacatatgtcgaaattaacacgaatcgagtctggtggatttgtgttgaaagatagccttacattagaacaaataaaagaacttcatgagcaggattcattgcaaaataaattgtttcctttagaatatggattaaagggtttgccaagcattaaaattaaagattcgcacataaaaaaacgtattttaaatgggcagaaatttaataaaaatgaatttgataacaaaattaaagaccaaattgtatttattgatgatgattcagaaaaagtattagcaatttatatggtacaccctacaaaagaatcagaaattaaacctaaaaaagtctttaattaaaggagatagaatttatgaaagtcatagaagtgacacatcctatacaatctaaacagtatattacagaggatgttgcaatggcattcggatttttcgatggcatgcataaaggtcatgacaaagtctttgatatattaaacgaaatagctgaggcacgcagtttaaaaaaagcggtgatgacatttgatccgcatccgtctgtcgtgttgaatcctaaaagaaaacgaacaacgtatttaacgccactttcagataaaatcgaaaaaattagccaacatgatattgattattgtatagtggttaatttttcatctaggtttgctaatgtgagcgtagaagattttgttgaaaattatataattaaaaataatgtaaaagaagtcattgctggttttgattttacttttggtaaatttggaaaaggtaatatgactgtacttcaagaatatgatgcgtttaatacgacaattgtgagtaaacaagaaattgaaaatgaaaaaatttctacaacttctattcgtcaagatttaatcaatggtgagttgcaaaaagcgaatgatgctttaggctatatatattctattaaaggcactgtagtgcaaggtgaaaaaaggggaagaactattggcttcccaacagctaacattcaacctagtgatgattatttgttacctcgtaaaggtgtttatgctgttagtattgaaatcggcactgaaaataaattatatcgaggggtagctaacataggtgtaaagccaacatttcatgatcctaacaaagcagaagttgtcatcgaagtgaatatctttgactttgaggataatatttatggtgaacgagtgaccgtgaattggcatcatttcttacgtcctgagattaaatttgatggtatcgacccattagttaaacaaatgaacgatgataaatcgcgtgctaaatatttattagcagttgattttggtgatgaagtagcttataatatctagagttgcgtatagttatataaacaatctataccacacctttttcttagtaggtcgaatctccaacgcctaactcggattaaggagtattcaaacattttaaggaggaaattgattatggcaatttcacaagaacgtaaaaacgaaatcattaaagaataccgtgtacacgaaactgatactggttcaccagaagtacaaatcgctgtacttactgcagaaatcaacgcagtaaacgaacacttacgtacacacaaaaaagaccaccattcacgtcgtggattattaaaaatggtaggtcgtcgtagacatttattaaactacttacgtagtaaagatattcaacgttaccgtgaattaattaaatcacttggtatccgtcgttaatcttaatataacgtctttgaggttggggcatatttatgttccaaccttaatttatattaaaaaagctttttacaaatattaacatttattatatgttaagctaatattgagtgaataataaggttacaatgagataaagatgatataagtacacctagagtaataatcaagatattaaaaataaagtatgtttttttaaaaaatataacttatatttatactgataagggtgggacgataagtctattttgtaaataatagatggatatcccgctctctttttttccaattcaatattttataactaatattaaaatacgataataaatgatatgatataactattagattcaagagaggagatttataatgtctcaagaaaagaaagtttttaaaactgaatgggcaggaagatctttaacgattgaaacagggcaattagctaaacaagcaaatggcgctgtattggttcgttatggagatacagtcgtgttatcgacggcaactgcatcaaaagaacctcgtgatggagatttcttcccattaacagtgaactatgaagaaaaaatgtacgctgcgggtaaaattcctggtggatttaaaaagagagaaggacgtcctggtgacgatgcaacattaactgcgcgattaattgatagaccaattagacctttattccctaaaggatataagcatgatgttcaaattatgaacatggtattaagtgcagatcctgattgttcaccacaaatggctgcaatgattggttcatctatggcgcttagtgtgtcggatattccattccaagggccaatcgccggtgtaaatgtgggttatattgacggtaaatatatcattaacccaacagtagaagaaaaagaagtttctcgtttagaccttgaagtagctggtcataaagatgcggtaaacatggtagaggcaggcgctagtgagattactgaacaagaaatgttagaggcgattttctttggtcatgaagagattcaacgtttagttgatttccaacaacaaatcgtcgaccacattcaacctgttaaacaagaatttattccagcagagcgtgatgaagcgctagttgaacgtgtaaaatctttaaccgaagaaaaaggacttaaagaaacagttttaacatttgataaacaacaacgagatgaaaatcttgataacttaaaagaagaaatcgtcaatgaatttatcgatgaagaagatccagagaatgaattacttattaaagaagtttatgcaattttaaatgaattagtgaaagaagaagttcgacgtttaattgcagatgaaaaaattagaccagacggccgtaaacctgatgaaatccgtccattagattctgaagttggtattttacctagaacgcatggttcaggtctatttacacgtggtcagactcaagcactttcagttttaacattaggtgctttaggcgattatcaattaattgatggtttaggacctgaagaagaaaaaagattcatgcatcattacaacttcccgaatttttcagtaggtgaaactggtccagtacgtgcgccaggtcgtcgtgaaattggacatggtgcgttaggtgaaagagcattaaaatatattattcctgatactgctgatttcccatatacaattcgtattgtaagtgaggtacttgaatcaaatggttcatcatctcaagcgtcaatttgtggatcaacattagcattaatggatgcgggcgtaccgattaaagcaccagttgctggtattgctatgggccttgttacacgtgaagatagctatacgattttaactgatatccaaggtatggaagatgcattaggtgatatggactttaaagtcgctggtactaaagaaggtattacagcaatccaaatggatattaaaattgacggtttaacgcgtgaaattatcgaagaggctctagaacaagcgagacgtggtcgtttagaaataatgaatcatatgttacaaacaattgatcaaccacgtactgaattaagtgcttacgcgccaaaagttgtaactatgacaattaaaccagataagattagagatgttatcggacctggtggtaaaaaaattaacgaaattattgatgaaacaggtgttaaattagatattgaacaagatggtactatctttattggtgctgttgatcaagctatgataaatcgtgctcgtgaaatcattgaggaaattacacgtgaagcggaagtaggtcaaacttatcaagccactgttaaacgtattgaaaaatacggtgcgtttgtaggcctattcccaggtaaagatgcgttgcttcacatttcacaaatttcaaaaaatagaattgaaaaagtggaagatgtattaaaaatcggtgacacaattgaagttaagattactgaaattgataaacaaggtcgagtaaatgcttcacatagagcattagaagaataatatttaaagtcatatgacgacaatgtatcgtcatgtgatttttttatgccactttttacgaagtgacccgttttgaatttgttgtattgaacattttaaaacgctttattattttgtgtgcaactgttaattatcctgtatgtatagtgattaatagtgtacatcaagtgttttttaacttataatgaatagtgagtttatatatggacgggtaacaaatttaggaggtaagattttgagtttaataaagaaaaagaataaagatattcgcattataccattaggcggtgttggcgaaattgctaaaaatatgtatatcgttgaagtagacgatgaaatgtttatgttagatgctggacttatgtttccagaagacgaaatgctaggtattgatattgttataccagacatttcatacgtacttgaaaataaagataaattgaagggtatattccttacacacggacatgagcacgcgattggtgcagtgagttatgttttagaacaattagatgcaccagtatatggatctaaattgacaatagcgttaattaaagaaaatatgaaagcccgtaatattgataaaaaagttcgctactatacagttaataatgattcaattatgagattcaaaaacgtgaatattagtttctttaatacgacacacagtattcctgatagtttaggtgtttgtattcacacttcatatggtgccattgtgtatacaggtgaatttaagtttgaccaaagtttacatggacattatgcaccagatattaaacgtatggcagagattggtgaagaaggcgtatttgtcttaatcagtgattctactgaggcagagaaacctggatataatactccggaaaatgtgattgaacatcatatgtatgatgcttttgcaaaagtgcgaggtcgcttgatagtttcatgttatgcttcgaactttatacgtattcagcaagttttaaatattgctagcaagctaaatcgtaaagtgtcatttttaggaagatcacttgaaagttcatttaatattgctcgtaaaatggggtatttcgacattcctaaagatttgctaattcctataacagaagttgataattatcctaaaaatgaagtgataattatagctactggtatgcaaggagaacctgtagaagccttaagtcaaatggcgcaacataagcataaaattatgaatatcgaagaaggcgattctgtatttttagcaattacggcttctgctaatatggaagttatcattgcgaatacattaaatgagcttgtacgtgctggcgcacatattattccaaataacaaaaagattcatgcttcaagtcatggttgcatggaagaattaaaaatgatgattaatattatgaaacctgaatactttattcctgtacaaggtgaatttaaaatgcagatagcacatgcgaagctagcagctgaagcaggtgttgcaccagaaaagattttccttgtggaaaaaggagatgtcattaattacaacggtaaagatatgatattaaatgaaaaggtaaattcaggaaatattttaatagatggcattggtattggggatgtaggaaatatcgtgttgagagaccgtcatcttttagcagaagatggtatctttattgctgttgtaacgttagatcctaaaaatagacgtatagctgcgggacctgaaattcaatctcgtgggtttgtatatgtacgtgaaagtgaagacttattacgtgaagcagaagagaaagtacgtgaaatagtagaggctggtttacaagaaaaacgcatagaatggtctgaaattaaacaaaatatgcgtgatcaaattagtaaactattattcgaaagtacaaaacgtcgtcctatgattattccagtaatttctgaaatttaatcaaaaagtcattaacataaaagaggtcagaacaagtcactgaaatataatggttgtcatggacaatttacttatattttatgatggtcaattgaaggggtaacgattaatctgttatcttaagtaaattgatacatagatgatattgttctaacctctttcatcgtctgtttggactacatattctaaacatcaaataggaaattatatataataacgtcgttttaactaaggcaacataaggaggtgcgtcaattggcacaagcaaaaaagaaatcgacagctaagaaaaaaacaacatcaaaaaaaagaacaaattcgaggaaaaagaagaatgataatccgatacgttatgtcatagctattttagtagttgtattaatggtgttgggtgttttccaattaggaataataggtcgtctaattgacagcttctttaattatttatttgggtacagtagatatttaacatatattttagtactcttagcaactggttttattacatactctaaacgtattcctaaaactagacgaacggctggttcgattgtattgcaaattgcattgctatttgtatcacagttagtttttcattttaatagtggtatcaaagctgaaagagaacctgtactttcttatgtgtatcagtcataccaacacagtcatttcccaaattttggtggcggtgtattaggcttttatttattagagttaagcgtacctttaatttcattatttggtgtatgtattattactattttattattatgctcaagtgttattttattaacaaaccatcaacatcgtgaagttgcaaaagttgcactggaaaatataaaagcttggtttggttcatttaatgaaaaaatgtcggaaagaaaccaagaaaaacaattgaagcgtgaagaaaaagcaagacttaaagaagaacaaaaggcacgtcaaaatgaacagccacaaataaaagatgtgagtgattttacggaagtgcctcaagaaagagatattccaatttatgggcatactgaaaatgaaagtaaaagccagagtcaaccaagtcgaaaaaaacgagtgtttgatgcagagaatagttcgaataacatcgtaaatcatcatcaagcagatcagcaagaacaattaacagaacaaactcataacagtgttgaaagtgaaaacactattgaagaagctggtgaagttacgaatgtatcgtatgttgttccaccgttaactttacttaatcaacctgcaaaacaaaaagcaacatctaaagctgaagtgcaacgtaaaggacaagtactagagaatacattaaaagattttggggtaaatgcaaaagtgacacaaattaaaattggtcctgcagtaactcaatatgaaattcaaccagctcaaggggttaaagtgagtaaaattgtaaacttgcataatgatattgcattagctttagcagcaaaagatgttagaatcgaagcgccaatacctggtcgttctgcagtaggtattgaagtgccaaatgagaaaatttcattagtttcactaaaagaagttttagatgaaaaattcccgtctaataataaactagaagttggattaggaagagatatatcaggtgatccaattactgttccactaaatgaaatgccacacttattggtggcaggatcgacgggtagtggtaaatctgtttgtataaatggtattattacaagtgttttattaaatgctaagccgcatgaagttaaacttatgttaatcgatccgaaaatggttgaactaaatgtttataacggaattccacacttattaattccggttgttacaaatcctcataaagctgctcaagctttagaaaaaattgtagctgagatggaaagacgttatgatttattccaacattcatcaactagaaacattaaaggttataacgaattaatccgtaagcaaaatcaagaattagatgagaagcaaccagaattaccttatatcgttgttattgtagatgagcttgcagatttaatgatggtagctggtaaagaagttgaaaatgcgattcaacgtattacacaaatggcacgtgcagcaggtatacatttaattgtagcgacacaaagaccttctgtggatgtaattacaggtatcattaaaaataatattccatctagaatagcttttgctgtgagttctcaaacagattcaagaactattattggtactggcggcgcagaaaagttacttggtaaaggtgacatgttatacgttggaaatggtgactcatcacaaacacgtattcaaggggcgtttttaagtgaccaagaggtgcaagatgttgtaaattatgtagtagaacaacaacaggcaaattatgtaaaagaaatggaaccagatgcaccagtggataaatcggaaatgaaaagtgaagatgctttatatgatgaagcgtatttgtttgttgttgaacaacaaaaggcaagtacatcattgttacaacgccaatttagaattggttataatagagcatctaggttgatggatgatttagaacgcaatcaggtaatcggtccacaaaaaggaagcaagcctagacaagttttaatagatcttaataatgacgaggtgtaaaaaaatgtcagaaatgaatgcggtatataacgttaaacaatacattttaaatttgattaagcaaaataaattggaatatggtgaccaacttccaagtaatttatcaattgccagagaattaaatgtaaaaaccgacgatgtttatgaagcaattcaggcattgattactgaacaagtcattaaagataattttgaagagggcacaagtgttaagtcactgccccctttcttttatccattgaatgaacttataagtattgggcaaatgattaaaaatgcaggatttgaatgcggaactgaatacttaaattttgatgagcaaccagcaactatgttagatgcaaatttgttgagcgttgaagaaggatatccagtaaccattatagaacgattacgaactgccgatggagaaccggtcgtctattgtttagataaaattgctaaaaaagaattaacatgtacagagtatcaaatgagcaatggatcgattctaagtgcgataaaagaacaaagtaatcataatatttgttatgctgatacagaaattgaagcggtaaattatgaacctcgaatatccgaagtactgaatgcttcgccacacgaaggtttgattttattaaaaattacgcactataatgaatcagatgaacctattttgtattcattaaattatatgaaaaatagcttagttcaatttaaaatcactagaaaaatatagatgtaagaagatatagaggaggctatatatttgagtagacaatctcaaccaaatatacatatcaaagtttcaccaacaactaaatttaaaacaactactatagtttttaaatttatggcacctttagaatatgacacaataacagctagatcattattaagcaaattattagttcgagcaactaagaaatggccaaccgataagtcgtttaataatcacttagccgatttatatggtgcgtatgtgaatagtacaatttcaaaattcaaagatcagcatgtcattacattttcattagaaattgttaatgaacgttatttaagaaacggtgaatcattatttaatcaaggattagatttattacaagaaatcatttggaatccattaattgaaaataaagcattcaatgataattttgttaaccaagagaaaacattattagccaaaaaaatagaagcaatggtagataataaagcacaatattcgtttttaaaattactcgaccatatgtttgaaaatgaagcatataaatacttatctacaggacaactagaacaaatcccacatattactgctgaaacactatatcatacatatcaatcaatgattaataatgatcaatgttctgtttatgttgtcggcaatgtagaacctgaaagtgttgagaaacaaatacgtgaaaaatttgcacttaaaccattcgataaacatcaattccaacattctactcatcatttacacgatgaagaagttgattatattgttgaatatgatgacgtggatcaagctaaattaaatatgggataccgttttccaacacaatatggacaaagtggatatgctgcctttgttgtatttaacatgatgtttggaggagatccttcatctgttttatttaatgaagtgcgagaaaagcaaagtttagcgtactctatacattcacaaattgatggcaaaaatggctatttatttgttttgagtggggtttcaagtgataagtacgaaactgcaaaagacactattataagtgaatttgaaaaaataaaagcaggagatttcactgaagaaaaattagagttagctaaaaaagtaatcatttctcatcgatatgaatctgaagatcgtccgaaaagtattatagagattatgcataaccaaatattattagagcaaccacaaagcaaagaaacatttataaatgatatacagaaggtaagtcgcgaagatattgtttctgttgctgaaaaagcatttttagatacaatctatgtgttgacaaaaggaggggataaataatgaaagagcgttattatgaattaatagacgaaagagtattcgaacaagaattagaaaatggtttacgattatttattatccccaaaccaggttttcaaaagacatttgtcacttacactacacaatttggttcattagataatcaattcaaaccccttggacaagaccaatttgttactgtacctgatggagttgctcactttttagaacataaattatttgaaaaagaagaagaagacttatttactgcgtttgctgaagataacgcacaagcaaatgcgtttacaagctttgatcgtacaagctacttgttcagtgcaactgataatattgaaaacaacattaaacgtttacttacaatggttgaaacgccttattttacaaaagaaactgttgataaagaaaaaggtattattgcagaagaaataaaaatgtatcaagagcaacctggatataaattaatgtttgatacattgcgtgcaatgtatcaacaacatccaatacgtgttgatattgccggtagtgtagaaagtatatacgatattacaaaagatgatttgtatctatgttatgaaacgttttatcatccatcaaatatggttttatttgttgttggcgatgtggatcctgaagcaatatgtcgaatagtaaaacaacacgaggatgctcgtaataaagttaaccaacccaaaatcgaacgaggacttgttgatgaaccggagaatgttaaagaagcatttgttactgaatctatgaaaattcaatcaccaagactaatgcttggttttaaaaataaaccattacaagaagcgcctcaaaaatatgtacaacgtgatttagaaatgtcattattctttgagttaatttttggggaagaaacagatttttatcagaatttattaaacgaaggacttatcgatgatacatttggttatcaatttgtactagagccgacgtatagtttttcaatcgtgacaagtgctactgaagaaccagataaattaaaaaaattattattagatgagttgcgtgataaaaaaggcaatttccaagatgcagaagcatttgaacttttgaaaaagcaatttataggtgaattcatatcaagtttaaactcacctgaatatattgctaatcaatatactaaattgtattttgaaggtgttagcgtgtttgacatgttagacattgttgaaaatatcacgttagatagtattaacgaaacgtcatcgttatatttaaatttagatcagcaagtcgatagtcgtttggagattaaaaagtaatgaaagcattagtattaggtggttctggttcaattggttctgagatagtcaaacaattattaactgatggatttgaagtttatgtgcaatattatcgtactgatataaatgaattaactagcaaatttaatgatgataaagttcgttttatacaagcggatttatctcaaacaattgatattgacaaaacatttggtgacattaaatcattagactgtttaatatatgcaagtggtcagtctttatatggtgttttacaagatatgaaagaccatgatattgatgcatgttatcagttaaatgtcttgcaattaattcgattatgtagatatttcgttgatgttttacgtcaaagtgccaatggaagaattattgtaatttcatcaatttggggtgagacaggagctagtatggaaactatttattcggcgatgaaaagtgcacaattaggtttcgttaaggcgcttagtcaagagcttgcactaacatcagtgacagtaaatgctatcgcacctggatttgtagccggtaatatggcaagtgagtggcaagaagatgaacttcaagcaatgataactgaattaccacaacagcgattggttttaccgagtgaggttgctcatacatgcgcctatttatatcacccaaatgctagaagtgttactggaactatacagaaagttaatggtgcttggtatatttaaaatatagaactatttttatgagcaaatgtttttatgattgatgttataatatgaatattacaatgaatcataatttgttaattaaacaaggggtgaggttcaccatgacagttgcagagaaaaaagaatggtacctagaatacgaaattgaaattaatagaccgggtcttttaggtgatgtatctagtttattaggtatgttaggtataagtattgttacaattaatggtgttgatcaaggtaaacgaggccttttaattaaaacagacaatcttgaaaaagttgaacgttttgagcaaatagctcgtggtataaatgaaattgaaataacaaagcttaaaaaaccagaattaagagaccgtcttgcagtaagacatggaagatatattgagcaagatgcaaaagataagaaaacctttcgatttgagcgtgaagatttaggcttgttagtagactttttagctgaattgttcaaagaagaaggtcataagttgattggcattagaggtatgccacgggttggtaaaactgaatcaattgttgcgggaagtgtttgtgcacataagagatggttatttattagttctactttaataaaacaaactgtacgtagctctctaattaaaggggaatatgatgccaatcatgtatacattattgatggtgcagttactgccagagaatctaatccaaaacatcaagagcttgttaacgaagttatgacgttaccatcaatcaaagtcgttgaacatccagatttatttgttgaaacaagtacttgtacaatggaagattttgactatattatcgaattgagagaaaatgaaaatcaagaaatacattacgaagaaatgaagaaacagacagtccaaagtaagaataatttagattttggagatccgtttggtggtggttttggtttcttcgagtaagtgtaaggaggctatgaattgaaaacggtcggtgaagcgctaaaaggtagacgtgaaaggttaggaatgactttaacagaattagagcaacgtactggaattaaacgtgaaatgctagtgcatattgaaaataatgaattcgatcaactaccgaataaaaattacagcgaaggatttattagaaaatatgcaagcgtagtaaatattgaacctaaccaattaattcaagctcatcaagatgaaattccatcgaaccaagccgaatgggacgaagtaattacagttttcaataataataaagacttagattataagagtaaatcaaaagagccaatacaattattagtaatcatgggtattacagttttaataactttattgttatggatcatgttagttttaatattttaacagaaataaattagtgagaaatgaggatgtataatgaatattccgaaccagattacggtttttagagtagtgttaataccagtttttatattgtttgcgttagttgattttgaatttggcaatgtgtcatttctaggaggatatgaaataagaattgagttattaatcagtggttttatttttatattggcttcccttagcgattttgttgatggttatttagctagaaaatggaatttagttacaaatatggggaaatttttggatccattagcggataaattattagttgcaagtgctttaattgtacttgtgcaactaggactaacaaattctgtagtagcaatcattattattgccagagaatttgccgtaactggtttacgtttactacaaattgaacaaggattcgtaagtgcagctggtcaattaggtaaaattaaaacagcagttactatggtagcaattacttggttgttattaggtgatccattggcaacattgattggtttgtcattaggacaaattttattatacattggcgttatttttactatcttatctggtattgaatacttttataaaggtagagatgtttttaaacaaaaataaatatttgtttatactagatttcattttcatatggaatctagtttttttaatcccaattttagaaattagccacgcaattgtttataatgatatattgtaaaacaatatttgttcatttttttagggaaaatctgtagtagcatctgatacattgaatctaaaattgatgtgaatttttaaatgaaatacatgaaaaaatgaattaaacgatacaagggggatataaatgtcaattgccattattgctgtaggctcagaactattgctaggtcaaatcgctaataccaacggacaatttctatctaaagtatttaatgaaattggacaaaatgtattagaacataaagttattggagataataaaaaacgtttagaatcaagtgtacgtcatgcgctagaaaaatatgatactgttattttaacaggtggcttaggtcctacgaaagatgacttaacgaagcatacagtggcccagattgttggtaaagatttagttattgatgagccttctttaaaatatattgaaagctattttgaggaacaaggacaagaaatgacacctaataataaacaacaggctttagtaattgaaggttcaactgtattaacaaatcatcatggcatggctccaggaatgatggtgaattttgaaaacaaacaaattattttattaccaggtccaccgaaagaaatgcaaccaatggtgaaaaatgaattgttgtcacattttataaaccataatcgaattatacattctgaactattaagatttgcgggaataggtgaatctaaagtagaaacaatattaatagatcttatcgataaacagactaatcctacgattgcgcctttggcgggaagtcatgaagtatatattagattgactgcaaatgccgactcaaaagaacaagcacaatcattgattcaacctgttaaacaagaaattcttgatcgtattggagaatattattatggttcagatgacacattaattgagcaagctgtaataaagaaaattcatgaaccttttgtaatatatgatggtattactaatggtgctttatatcatcgattgaaagaagtggatttaaacgatgttctaaagggtatgattaatcacaatgaaaactttgttgatattaataaacctattgagcagcaattaaaagatgcagtgcaatttgttaataaattgtttaatgtgtcatcagcaattattctattagagtatgatggtgtagttcatataggctatgataataactttgaatttaaaactgagcaatttaaaatgtctaaatctagaaatttattaaagaacagaagtcaaaattatgcgctcataagattattaaattggcttagaacaacaaattaattgtattatcgataaaaatataagcacgtttgttcgtttttgcgttttgatttcaagattttatacgaacaaatattcgcaaaacacttgtattttattttgaatccttgtatagtattggtaagataattaaaagatagcaatttcaattaggaggtctcgctttggataacgatcgtcaaaaagctttagatacagtaattaaaaatatggagaaatctttcggtaaaggtgccgtaatgaagttgggtgacaatataggtcgccgagtttcaactacatcaactggttcagttacattagataatgcgctaggtgtaggtggctatcctaaaggacgaattattgaaatttatggtcctgaaagttctggtaagacaacagtagcgcttcacgctattgctgaagtacaaagtaatggcggggtggcagcatttatcgatgctgaacatgctttagatccagaatatgctcaagcattaggcgtagatatcgataatttatatttatcgcaaccggatcatggtgaacaaggtcttgaaatcgccgaagcatttgttagaagtggtgcagttgatattgtagttgtagactcagttgctgctttaacacctaaagctgaaattgaaggagaaatgggagacactcacgttggtttacaagctcgtttaatgtcacaagcgttacgtaaactttcaggtgctatttctaaatcaaatacaactgctattttcatcaaccaaattcgtgaaaaagttggtgttatgttcggtaatccagagactacaccaggtggacgtgcattaaaattctatagttcagtaagactagaagtacgtcgtgcagaacagcttaaacaaggacaagaaattgtaggtaatagaactaaaattaaagtcgttaaaaataaagtggcaccaccatttagagtagctgaagttgatattatgtatggacaaggtatttctaaagagggtgaacttattgatttaggtgttgaaaacgacatcgttgataaatcaggagcatggtattcttacaatggcgaacgaatgggtcaaggtaaggaaaatgttaaaatgtacttgaaagaaaatccacaaattaaagaagaaattgatcgtaaattgagagaaaaattaggtatatctgatggtgatgttgaagaaacagaagatgcaccaaagtcattatttgacgaagaatagtacacaaatttatatctatagttaaacttagcaaatatccttataggattgattgaaagtgatattcatctcataaagctagaataatatctaactttatgggatacactacaaatcgagactataaggttttttattttatttattattacattatcaatagttttataatcgagcttcaaaactttagaaaatagtagaaatagcattcaatatagtgcaaaagtgcaaattgataacttgacacttatctcctataaaccgtacaattaatttgtatgatttatatataatttcataaagtcatattgaatttcatataaagagcaaaccctagaaaaggaggtgtttgtgtgaatttattaagcctcctactcattttgctggggatcattctaggagttgttggagggtatgttgttgcccgaaatttgttgcttcaaaagcaatcacaagctagacaaactgccgaagatattgtaaatcaagcacataaagaagctgacaatatcaaaaaagagaaattacttgaggcaaaagaagaaaaccaaatcctaagagaacaaactgaagcagaactacgagaaagacgtagcgaacttcaaagacaagaaacccgacttcttcaaaaagaagaaaacttagagcgcaaatctgatctattagataaaaaagatgagattttagagcaaaaagaatcaaaaattgaagaaaaacaacaacaagtagatgcaaaagagagtagtgttcaaacgttaataatgaagcatgaacaagaattagaacgcatctccggtctcactcaagaagaagctattaatgagcaacttcaaagagtagaggaagaactgtcacaagatattgcagtacttgttaaagaaaaagaaaaagaagctaaagaaaaagttgataaaacagcaaaagaattattagctacagcagtacaaagattagcagcagatcacacaagtgaatcaacggtatcagtagttaacttacctaatgatgagatgaaaggtcgaatcattggacgagaaggacgaaacatccgcacacttgaaactttaactggcattgatttaattattgatgacacaccagaagcggttatattatctggttttgatccaataagaagagaaattgctagaacagcacttgttaacttagtatctgatggacgtattcatccaggtagaattgaagatatggtcgaaaaagctagaaaagaagtagacgatattattagagaagcaggtgaacaagctacatttgaagtgaacgcacataatatgcatcctgacttagtaaaaattgtagggcgtttaaactatcgtacgagttacggtcaaaatgtacttaaacattcaattgaagttgcgcatcttgctagtatgttagctgctgagctaggcgaagatgagacattagcgaaacgagctggacttttacatgatgttggtaaagcaattgatcatgaagtagaaggtagtcatgttgaaatcggtgtagaattagcgaaaaaatatggtgaaaatgaaacagttattaatgcaatccattctcatcatggtgatgttgaacctacatctattatatctatccttgttgctgctgcagatgcattgtctgcggctcgtccaggtgcaagaaaagaaacattagagaattatattcgtcgattagaacgtttagaaacgttatcagaaagttatgatggtgtagaaaaagcatttgcgattcaggcaggtagagaaatccgagtgattgtatctcctgaagaaattgatgatttaaaatcttatcgattggctagagatattaaaaatcagattgaagatgaattacaatatcctggtcatatcaaggtgacagttgttcgagagactagagcagtagaatatgcgaaataatttttgtctccctcacaaattagtgagggagcttttttaagttgtagtcttaatctagttagacagcactttatcggtaataactatattaaacagtagttatttgaaagtaagacggaccttatattaaataagaagttattgcttttaataaaaatgttttaggcttcgtaattactatatttatattatgtaaacctataaagatgattgcttttctatccaataaaaaagaagagaagatgtaacacatcttctcttctgcaatattaattaggatttatttctaagttgagttattttaattgtaaatctgttttctttaattcttttataacttctgcagtatcataacaatttgttgcaattgttgaatatctctctgctaaacgatatgcattaatgtaaagctttaaactttctttagctatatcctctgcatcttcgaattttgatgggttagacataaccactaattctgcaaatttttctggatcaatattaatagacatgtatttatttacaactcctatttattttgatgtcttaatactaacatattgaagttttcagacaaagtaatgtctctctataattgaagaaaaataattcaaagaatttaatatttactttaaatattagaacgtatgaattaaactagtatttatgagaggatgaacaaaacatgagaataatgtttataggggatatcgtaggtaaaattggacgagacgcaattgaaacgtacatacctcaactgaagcaaaagtataaaccaacagttacaattgtaaatgctgaaaatgcagcacatggtaaaggtttgactgaaaaaatatataaacaattactaagaaatggtgtagatttcatgactatgggtaatcacacatatggtcaacgtgaaatttatgattttatagatgaagcaaaacgactagtaagaccagcgaattttccggatgaagcgccgggaattggtatgagatttatacaaattaatgatattaaacttgcagttattaatctgcaaggaagagcgtttatgccagatattgatgatccttttaaaaaggcagatcaattagtcaaggaagcacaagaacaaactccgtttatatttgttgattttcatgcagaaacaacttctgaaaagtatgcaatgggatggcatttagatggtagagctagcgctgttgttggaacgcatacacacattcaaacagcagatgaacgtattttaccaaaggggacagggtatataacggatgttggtatgacaggtttttatgatggcattttaggaataaataaaacagaggtaattgagcgttttatcactagtttgccacaaagacatgttgttccaaatgaaggtagaagtgtattatctggtgttgttattgatttagacaaagaaggtaaaacaaagcacatcgaacgtatattgataaatgatgaccatccattttcaacattttaaaattacgtaagtaaacattcgaattggaccctatcgtccattagtatgaatttaatatagtaccactgtttacatagtaaatcggtggttctttttgttatcatttaatatgaaatatatccataggaggcatataactatgaaaccacaattatcgtggaaagttggcggtcaacaaggcgaaggtattgaatcaactggggaaatcttcgctacggctatgaatagaaaaggatattatttatatggatatagacatttttcaagtcgtatcaaaggtggacatacgaataataaaattagagtttctacgacgcctgttcatgcaattagtgatgatttagatattttgattgcatttgaccaagaaacaattgatgttaaccatcatgaaatgagagaagacagtattattttagctgatgccaaggctaaacctgtgaaaccagaaggatgtcatgcacagcttattgaattaccttttacagcaaccgctaaagaattaggtacagcattaatgaaaaacatggttgcaataggtgctactagcgcattgatgaatttgaatacaaatacatttgaagaacttattactaatatgttttctaaaaaaggtgacaaggtagttgaagtcaatatccaagcattaaacgaaggttatcaattaatgcaatctcgcttacctgaaatctacggggactttgaattagagtcaacagatgcactaccacatctatatatgattggtaacgatgccattggattaggtgcaattgctgcaggttcacaatttatggcggcatatcctattacacctgcgtctgaagttatggaatatatgattgccaatatatctaaagtaaacggagcggttattcaaacagaagatgaaattgctgctgtaactatggctattggtgcaaattatggtggagtcagagcgtttacggctagtgctggtccaggtttatctttaatgatggaagcaattggattatctggtatgactgaaacgccattagtcattattaatacccaacgaggtggaccttctactggattacctacgaaacaagaacagtcagatttaatgcaaatgatttatggtacacatggtgatattccaaaaattgttgtagcaccaacagatgcagaagatgcattttatttaactatggaagcatttaatttagcagaacaatatcaatgccctgttatagttctaagtgatttgcaattatctttaggtaaacaaactgttgaaaaattagattataatcgtattgaaattaaacgtggtgaaatcattcaatctgatattgaacgtgaagaagatgataaaggttatttcaagcgttatgcgttaacatccgatggtgtttctcctagacctatccccggtgttaaaggaggtattcatcatataactggtgtggaacacaatgaagaaggtaaacctagtgaatctgcgtcaaatagacaacaacaaatggaaaaacgaatgcgtaaaattgagcagttactaattgaatcgccagtagaagctaacttacaacatgaggatgcagatattctttatatcggttttatttctacaaaaggtgcaattcaagaaggtagtaaccgtttgaatcaacaaggcataaaagttaacactatacaaattagacaattgcatccattcccaacaagcgttattcaagatgcagttaataaagcgaagaaagtcgttgtagtggagcacaattatcaaggacaattggctagtattataaaaatgaatgtcaatattcatgataagattgaaaattatacaaagtatgatgggacacctttcctaccacatgaaatcgaagaaaaaggcaaaataattgctactgaaataaaggagatggtatagatggcgacatttaaagattttagaaataatgttaagcctaactggtgccccggatgtggcgatttctcagtacaagctgcaattcaaaaagcagccgcaaatatagggttagaacctgaagaagtagctatcatcaccggtataggatgttctggccgtctttcaggatatattaattcttatggcgttcattctattcacggacgtgcattacctttagctcaaggtgtaaaaatggcgaataaagatttaactgttattgcatcgggaggagatggtgatggttatgctataggtatggggcatacaatccatgctttaagaagaaatatgaacatgacgtatatagtcatggataatcaaatttatggtttgacaaagggacaaacatcgccgtcatcagcagtaggatttgttactaaaacaacgccaaaaggtaatatagaaaaaaatgttgcgcctttagaattagcattatcatctggtgccacatttgtagcccaaggtttttcaagcgatattaaaggattaacaaaactaattgaagatgcaattaatcatgatggattttcattcgttaatgtcttttcaccatgtgtgacttataataaaattaacacatacgattggtttaaagaacatttaacaagtgttgatgacattgaaaattatgattctacagataaacaattagcgactaaaactgttattgaacatgaatctttagtaactggtattgtttatcaagataaagaaacaccatcatatgaatctcaaattaaagagttagatgatacaccacttgctaaaagagatatcaaaattactgaagacaccttcaatgcattaactgaacaatttatttaataattaaaactgagtcgtataaatgtatttataacagatccatttatgctactcagttttttactattacaaaaaataaaggagtttttaaaaatgaaagacacattaatgagtatacaaataattcctaaaacaccaaacaatgacaatgttataccttacgtagacgaggcgattaaaataattgacgaatctggtttgcattttagagtaggtccgttagaaacgacagtacaaggaaatatgaatgaatgtttaattttaatacaatcattaaatgaacgaatggtggaacttgaatgtccaagtattattagccaagttaagttttatcatgtgccagatggcatcactattgaaactttaactgaaaaatatgatgaataacattaaaagtgaagtaaactggatttgaattggcttgttagagatgacgtataactttaactgtttttgcactttatagttaaatttaatataattattaaatgatacgggcaaatagaaaggattttgtaaagtgaacgaagaacaaagaaaagcaagttctgtagatgttttagctgagagagataagaaagcagaaaaagattatagtaaatattttgaacatgtttatcagccgcctaatttaaaagaagcgaaaaaaagaggtaaacaagaagttcgttataatagagatttccaaattgatgaaaaatatcgcggtatggggaacgagcgtacatttttaattaaaacatatggatgtcaaatgaatgcacatgacactgaggtcattgctggtatacttgaagcattaggctatcaagcaacgactgatattaacactgcagatgttattttaattaatacatgtgcgattagagaaaatgccgagaacaaagtgtttagtgaaataggtaatttgaagcatttgaaaaaagaacgacctgatattttaatcggtgtttgtggttgtatgtcacaagaagagtcagtagtgaataaaattttaaaatcgtatcaaaatgtagatatgatatttggtacacataatattcatcatttaccagaaattttagaagaagcatacttatctaaagcaatggttgttgaagtatggtctaaagaaggagacgttattgaaaatcttccaaaagtccgtgaaggcaacattaaagcatgggtcaatattatgtatggttgtgataagttttgtacatattgtattgttccatttacaagaggtaaagaacgaagccgtagacctgaagacattatagatgaagtacgtgaacttgctcgtgaaggttacaaagaaataacgcttttaggtcaaaatgtaaattcttatggtaaagatttacaggatatagaatatgacttaggagatcttttacaagcaatttctaaaatagcgattccaagagttcgtttcacaacaagtcatccttgggactttacagatcacatgattgatgttatttcagagggtggtaatatcgttccgcatatccacttgccagttcaatctggaaataatgcagtattaaaaataatgggtagaaaatatacacgagaaagttatttggatttagtaaaacgaatcaaagatagaattcctaatgtagcattaactacagatattattgtagggtatccaaatgaatcagaggaacaatttgaagaaactttaactctgtatgatgaagttggttttgaacatgcatatacgtacttgtattcacaacgtgatggtacgcctgctgctaaaatgaaagataatgtacctttaaatgtcaaaaaggaacgattgcaacgtttgaataaaaaagttggtcattattcacaaatagctatgagtaagtacgaaggacaaactgtaacagtactttgtgaaggaagtagtaaaaaagatgatcaggttcttgctggctacactgataaaaataagctagttaatttcaaagcgcctaaagaaatgattggtaaactagtggaagtacgaatagatgaagctaaacagtattcattaaatggcagttttataaaggaagtagagccggaaatggtgattcaataaatgtataataaagatgacgtgttgaaccaagcggataatattgcaaataaaattaaaaatttggatactatcaaaacatatcaacaaattgaagcacagattcatcagaaccaaacgataaagactaaaatggatatgttaaaaaagcatcaaaaacaagcagtaaactttcaaaattacgggaaacaaaatgcgctagaacagtcggaacataccattcagagtatagaagcagaaataaatacattgcccatagttgaacagtttcaaacttcacaatatgaagcgaatcaattattgaaaatgtttgtatcaacaatggaaacacgtttaaatgaccataataaagccaagcatagtgattaattacaaacaaaaaggagaacaatcatatgaaatcaagaaaactggctataactgcacttttaattgcaataaatgttgtattaagcagtattatcatcattcctctaggaccagttaaggcagcaccagtacagcattttgtaaatgtattaagtgcggtcatagtaggtccttggtatggattagctcaagcgcttatatcatcaattttaagagttctttttggtactggtacagcttttgcatttccgggtagtatgattggagttttattggctagtatgttttacatatatcgtaaacatatatttatggccgcggtcggtgaagtacttggaactggtgtcatcggaagtttaatttgtataccattagcatatttccttgggcttcaagacttcttcattaaaccgttaatgattacgttcatagtctcaagtgctatcggatctattataagttatttcttattaattactctaaaaaaacgtggtattcttcaaaggtttataaaataattttatgatatatgatttcaaacagagtcattgttcattttaatattgaacgcccttacttaattaaatgtcttgaatgttagaattttaatttaattctaaacatgctattgacacattttattaggtttgaggcgttttcttatacatttaagatgcttcgtgattatatggtatgaataggtttgtaaaagtaagtatgttaaaatgtataagttaaataattaataattaaaaagcttacaaacgaatatattgtaaagacaaattttaaaaagagacaagggttgtgaagaaataatatgtctaatgttacaccaatgatgcagcaatatttaaaaataaaatcagaataccaagattgcttattattttttagactaggtgatttctatgaaatgttttatgaagatgccaaggaggcatcacgtgtacttgaaattactttaactaaaagagatgctaaaaaagaaaatccaattccgatgtgtggtgttccgtatcattctgcagatagttatatagatacacttgttaataatggatataaagtagctatttgtgaacagatggaagatccgaaacaaacgaaaggtatggttagacgtgaggtagtaagaattgtgactccaggaactgtgatggagcaaggtggtgtagatgataaacaaaataactatattttaagttttgttatgaatcaacctgaaattgcgcttagttactgtgatgtttctactggcgaattaaaggttacacattttaatgatgaagcgactttattaaatgaaattacgacgataaaccctaacgaagttgttatcaatgacaatatttccgataatttaaaaagacaaattaatatggtgacagaaacaataacagtcagggaaacgttatcatcagaaatctatagtgtgaatcaaactgaacataaattaatgtatcaagcgacacaattattgctagattatattcatcatacacaaaaacgtgatttatcgcatatcgaggatgttgttcaatatgcagctatagattatatgaaaatggatttttatgctaagagaaaccttgagttaacggaaagcattcgattaaaatcaaaaaaaggaacgctactttggctaatggacgaaacgaaaacaccaatgggagcacgccgcttaaaacaatggatagatagaccactaataagtaaagaacaaattgaagcacgattagatatcgttgatgaatttagtgctcatttcatagaaagagacaccttaagaacatatcttaatcaagtgtatgatattgaacgtcttgttgggcgtgttagttacggaaatgttaatgcgagagatttaattcaacttaaacattccatttctgaaataccgaatattaaagcattactaaattctatgaatcagaatactcttgtacaagttaatcaactagaaccccttgatgatttacttgatatattagaacagagtttagtagaagaaccaccaatttcagttaaagatggcggactattcaaagttggttttaatacgcaattagatgaatatcttgaagcttcaaaaaacggaaaaacatggttagcagaattacaagccaaagaaagacaacgtacaggaataaaatcattgaaaataagctttaataaagtgtttggttattttatagaaataacacgtgccaacttgcaaaattttgaaccaagtgaatttggttatatgaggaagcaaacgttatcgaatgctgaacgttttataactgatgaacttaaagaaaaagaagatatcattttaggtgcggaagacaaagccatcgaattagaatatcaattatttgttcagctacgtgaagaagttaaaaaatatactgaacgtttacaacaacaagctaaaattatttcagagctagattgtttacagagctttgcagaaattgctcaaaaatataattacactaggccttcatttagtgaaaataaaacattagaattagtggaatctaggcacccagtagtggaaagagtaatggattataatgactatgtgcctaataattgtcgattagataatgaaacatttatatatttaattacaggtccgaatatgtctggtaaatcgacatatatgagacaagttgccataattagtataatggcccaaatgggagcttatgtcccttgtaaagaggcagtgttacctatatttgatcaaatattcactagaataggtgcggcagatgatttggtttcaggtaagagtacgtttatggtagaaatgctagaagcacaaaaggcattaacttatgcaacagaggatagtttgattattttcgatgaaattggacgtggtacttcaacgtatgacggtttagctttagcgcaggcaatgatagagtatgtagctgaaacatcacatgctaaaacgttattttcaacacattatcatgaattgacaacattagatcaagcattaccaagtctaaaaaatgttcacgtcgctgctaatgaatataaaggtgaacttatattcttgcataaagtcaaagatggtgcagttgacgatagttatggtattcaagttgcgaaattagctgatttacctgaaaaagttattagcagagcacaagtgattctaagcgagtttgaagcgtctgctggtaaaaaatcatcgatatcaaatttaaaaatggtcgaaaatgaacctgaaattaatcaagaaaatttaaacttaagtgttgaagaaacaactgatactttatctcaaaaagactttgaacaagcatcatttgatttgtttgaaaatgatcaagaaagcgagattgaactacaaattaaaaatttgaatttatctaatatgacaccaattgaggcattggtgaagttaagtgaattacaaaatcaattaaaatagaggtgttgcaaaatggggaaaattaaagaactccaaacctcattagcaaataaaatcgcagcaggtgaagtagttgaaagaccgagttctgttgtgaaagaactgttggaaaatgctatagatgcaggcgctacagaaataagcattgaagtagaggaatctggcgtccaatctattcgcgtagtcgataatggaagcggaattgaagcggaagacttaggattagtatttcatagacatgcgactagtaaattagatcaagatgaagatttatttcatattaggacattaggattccgtggtgaagcactagccagtatttcatcagttgctaaagtaacattgaagacttgcacggataatgctaatggaaatgaaatatatgtagaaaatggtgaaatattaaatcataagcctgcaaaagcgaaaaaaggaacagatatacttgtagaatcattattttataatacaccagcacgtttaaaatatattaaaagtttatacactgaactaggtaaaataacagatattgtcaacagaatggcaatgagccatccggacattcgaatagcactcatttcagatggcaaaacaatgttaagtacaaatggttcaggacgaactaatgaagtgatggcagagatttatgggatgaaagttgcacgagatttagtacatatatctggagatacaagtgattatcacattgaaggttttgttgcaaagcctgaacattctagaagtaataagcactatatttctatttttattaatggacgatacattaaaaactttatgctaaataaagcgattttagaaggctatcatacactcttaacaataggtaggttcccgatttgttatattaatattgaaatggatccaatcttagtagacgtaaatgttcatccaacaaaactagaagtgcgtttatcaaaagaagagcaactataccaattgattgtgagcaaaatacaagaagcatttaaagaccgtatattaattcctaaaaataacttggattatgtgccaaaaaaaaataaagtattacattcattcgaacaacaaaaaatcgaatttgaacaaagacaaaacacagagaataaccaagagaagacgttttcatctgaagaaagtaacagtaagccatttatggaagaaaatcaaaacgatgagatagttataaaagaagattcatataatccattcgtaacgaaaacatctgaaagtttaatagctgatgatgaatcttctggttataataatacacgtgaaaaagatgaagactacttcaaaaaacaacaagaaattttacaagaaatggatcaaacatttgattcaaatgatggtacaactgtgcaaaattatgagaataaagcgtctgatgattattatgatgtaaacgatattaaaggaacaaaaagtaaagaccctaaacgaagaattccatatatggaaattgttggacaagtacatggaacgtatattattgctcaaaatgaatttggcatgtacatgattgaccagcatgcagctcaagaaagaataaaatatgaatattttcgagataaaataggtgaggttaccaatgaagtacaagatttattaatcccgttaacatttcatttttcaaaagatgaacaattagtcattgatcaatataaaaatgagcttcaacaagtaggtatcatgttagaacattttggtggtcatgattatattgtaagtagctatccagtttggttccctaaagatgaagtagaagaaattattaaagatatgattgagctaattttggaagagaaaaaagtagatatcaaaaaattacgtgaagatgtagcaatcatgatgtcatgtaaaaaatccattaaagcgaatcattatttacaaaaacatgaaatgtctgatttaattgatcaattaagagaagcggaagatccatttacatgtccacatggtcgtccaataatcattaatttttcaaaatacgaattagaaaaattatttaagcgtgtgatgtagagaggatgaatcaagtgaataacaacatattgcctgctataagaaacattaaagatttagagaaactgattaaaacagactataaaatgtgtgtgcttctagatatgcatataggacatataaaaagtattatggaattgctgaagcaaaatcatatagagtgttttattcatatagatttgataaaaggtttaagccacgatgaatttgcaagtgaatttattattcagcaatacaagccaaaaggtatcgtatcgactaaatctaaagtaataaaaaaagctaaatcattaaatactttaacgatttttagagtatttattattgatagtcaagcattgaaacgcagtatagatttgataaaaaaagttgaacctgattttgttgaagtacttccaggtgttgcgagtaaagcgattcatcatattcagaaagaaacaaacacacaagtcattgcaggtggcctaattaatacaatagatgaagtcaatgaagctgttaaaaatggagcgaaatatgtaactactagttatgataaactttggtaaatcataagtctgcaaaaatttcatttttcacgagatttagtcatataacataataaaaaagccgttttcatatgggatatgcagtaggtatcaaacaaaaaataatcaaataaaataattagcacctctaaaacgattaaaatcattaaagttttagaggtgtttattagtaaaaaatgcaactagtcataaaaaatatggctgaagaatgtcaattaaacaaaagagcgtcataaataaattagttaggattggtatttctagttttcaaattaaactacttttataaagacttgaaaaattaaatttgacaaaatttttacaaaaaccattgacaacgctttcatatcgatagtatcataacaaatataataaaagttaatacatagaatagagacgggagatttctacgagccaaactgctagtgtaggaatctctttgtctttttgggaggacatttaatatgaatgtatatttagcagaattcctaggaactgcaatcttaatcctttttggtggtggcgtttgtgccaatgtcaatttaaagagaagtgctgcgaatggtgctgattggattgtcatcacagctggatggggattagcggttacaatgggtgtgtttgctgtcggtcaattctcaggtgcacatttaaacccagcggtgtctttagctcttgcattagacggaagttttgattggtcattagttcctggttatattgttgctcaaatgttaggtgcaattgtcggagcaacaattgtatggttaatgtacttgccacattggaaagcgacagaagaagctggcgcgaaattaggtgttttctctacagcaccggctattaagaattactttgccaactttttaagtgagattatcggaacaatggcattaactttaggtattttatttatcggtgtaaacaaaattgccgatggtttaaatcctttaattgtcggagcattaattgttgcaatcggattaagtttaggcggtgctactggttatgcaatcaacccagcacgtgatttaggtccgagaattgcacatgcgattttaccaatagctggtaaaggtggttcaaattggtcatatgcaatcgttcctatcttaggaccaattgccggtggtttattaggtgcagtggtatacgctgtattttataaacatacatttaatattggttgtgcaattgcaattgttgtagttattattactttgattttaggttacattttaaataaatcatcaaaaaaaggtgatatcgaatcaatttactaaaataaaaagaaacgtaaatagcataatttaacatgtttgattcatggattatgctattttttcgccaaaatttaacagattttgtacaatgggttagcgattattttttaataaaggagatactactaatggaaaaatatattttatctatagaccaaggaacaacaagctcaagagcgattttattcaatcaaaaaggggaaattgcaggggtagcacaacgtgagtttaagcaatattttccacaatcaggttgggttgaacatgatgcaaatgaaatttggacatctgtgttagctgtaatgacggaagtaattaatgaaaatgatgttagagctgatcaaattgcaggtatcggtattacaaaccaacgtgaaacaacggttgtttgggacaaacatactggccgcccaatttatcacgcaattgtttggcaatcacgtcaaacacaatcaatttgttcagaattaaaacaacaaggatatgaacaaacatttagagataagacaggattacttttagatccgtattttgcaggtacaaaagttaaatggattctagacaatgttgaaggtgcacgagaaaaagcagaaaatggcgatctattatttggaacgattgatacttggttagtatggaaattatcaggaaaagctgcgcatattactgattattcaaatgcgagtcgtacattaatgtttaatatccatgatttagaatgggacgatgagttattagaactacttacagtacctaaaaatatgttgccagaagttaaagcttcgagtgaagtatatggtaagacaattgattaccacttctatggtcaagaagtaccaatcgctggagtagctggtgatcaacaagcagcattatttggacaagcttgcttcgaacgtggtgacgtgaaaaacacatatggaactggtggcttcatgttaatgaatacaggtgacaaagcggttaaatctgaaagtggtttattaacaacaattgcttatggtattgatggaaaagtaaattatgcgcttgaaggttccatctttgtttcgggttcagcaatccaatggttacgtgatggattaagaatgattaattcagcaccacaatcagaaagttatgcgacacgagttgactctactgagggtgtttatgttgttccagcttttgtaggtttaggaacaccatattgggattctgaagcacgtggtgcgattttcggtttaacacgtggaactgaaaaagagcactttatccgtgcaactttagaatcactatgttaccaaactcgtgacgttatggaagcaatgtcaaaagactctggtattgatgtccaaagtttacgtgtcgatggtggtgcagttaaaaataactttattatgcagttccaagcagacattgttaatacttctgttgaaagacctgaaattcaagaaactacagctttaggtgctgcatttttagcaggtttagcagttggattctgggagagtaaagatgatatcgctaaaaactggaaattagaagaaaaattcgatccgaaaatggatgaaggcgaaagagaaaaattatatagaggttggaaaaaagctgttgaagcaacacaagtttttaaaacagaataaacttgtagattagacttttgtataaacattgtgatacaatcaatttaagttaatatttgaatcgagaagcgagagatttgttcgaacatgtacaattgaaggattgtttatgtgggacaagtctctcgtttttacattttttaggaggcgttttggaatggcattgtctacttttaagagagaacatattaaaaagaatttaagaaatgatgaatatgatttagtaattattggtggcggtattacaggtgcaggtattgcactagacgcgagtgaaagaggaatgaaagttgcattagttgaaatgcaagactttgcacaaggaacaagctcaagatctacaaaattagtccatggtggtttgcgttacttaaaacaattccaaattggagtagttgccgaaactggtaaagaacgtgcgattgtttatgaaaatgggcctcatgttacgactccagagtggatgcttttaccaatgcataaaggtggaacatttggtaaattctcaacatcaattggtttaggaatgtatgatcgtttagcaggtgttaagaagtctgaacgtaaaaaaatgttatctaaaaaagaaactttagctaaagaaccattagttaaaaaagaaggtctaaaaggcggcggttactatgttgaatatcgtactgacgatgcgcgtttaactattgaagttatgaagcgtgctgctgaaaaaggcgcagaaattatcaactatactaaatctgaacacttcacttatgataaaaatcaacaagtaaatggtgttaaagttatagataaattaactaatgaaaattatacaattaaggctaaaaaagtggttaatgcagcaggtccatgggttgatgatgttagaagtggtgattatgcacgcaataataaaaaattacgtttaactaaaggtgtacatgttgttattgatcaatcaaaattcccattaggtcaagcagtatactttgatactgaaaaagatggaagaatgatttttgcaattccacgtgaaggaaaagcgtatgtaggtactacagatacattctatgacaatatcaaatcttcaccattaactacacaagaagacagagactatttaatcgatgcgattaattacatgttccctagtgttaatgttacagatgaagatattgaatcaacatgggcaggaattagaccattaatttacgaagaaggcaaagacccttctgaaatctctcgtaaggatgaaatttgggaaggtaaatcaggtttattaactattgcaggtggtaaattaacaggctatcgtcacatggctcaagacattgttgatttagtatctaaacgcttgaaaaaagactacggtttaacatttagtccatgtaatacaaaaggtctggcaatttcaggtggcgatgtaggtggtagcaagaactttgatgcgtttgtagagcaaaaagtagatgtagctaaaggattcggcattgatgaagatgttgcaagacgtttagcatctaaatatggttcaaatgttgatgaattgttcaacattgcgcaaacatctcaataccatgatagcaagttaccattagaaatttatgtagaacttgtttatagtattcaacaagaaatggtatacaaacctaacgatttcttagttcgtcgttctggtaaaatgtatttcaatattaaagatgtattagattataaagatgctgtcatcgatattatggcagatatgcttgattactctccagctcaaattgaagcatatactgaagaagttgagcaagcaattaaagaagcgcaacatggaaataatcaaccagcagttaaagaataattaatttgtacaatcataaactggtgtcctgttttaagggcatcagtttttttatacgagatacattagtcaattgaaactatgcatcactaaatgtatgataataataaaagcgaatataaaagcgttgttattaaaggtgtgagatgatgactgaaaaacaatttaaattaactgtacaagataatacgaatattgaagttaaagtgaattttacagatgtagattcaaaaggaattattcatatatttcatggtatggctgaacatatggaacgttacgataaattagcacatgcactttcaaagcatggcttcgatgtgatacgtcataatcatcgaggacatggtattaatattgatgaatcaacaagagggcattacgatgatatgaaacgagttatcggtgatgcctttgaagtagcgcaaacagtgagaggcaatgttgataaaccatacattataatcggacattcaatgggatccgttatagctagattgtttgtagaaacatatccgcaatatgttgatggtctaattttaagtggtactggtatgtattcattatggaaaggtttaccaaccgttaaagtgttacaactgattacaaaaatttatggtgctgagaaacgagttgaatgggttaaccagttagtatcaaatagttttaataaaaaaatacgtccattacgtacacaaagtgattggatttctagtaatccaattgaagtagataactttattaaagatccatatagtggatttaatgtgtcaaatcaattattatatcaaacagcctattatatgctacatacatcacaattaaaaaatatgaaaatgttaaatcatgccatgcctatattattagtttcaggatatgacgatcctttaggtgattatggtaaagggattttaaaattggcgaatatatatagaaaagctggcattaaaaatgttaaagtgaatctttatcatcataaacgtcatgaagtgttatttgaaaaagatcatgacaaaatttgggaagacttgtttaaatggttgaatcaattttataaaaaataaagaaagtggaattaaatatgaataaaaataagccttttattgtagtaattgtggggccaactgcttcaggtaaaacagagcttagcatcgaactcgcgaagcgtatcaatggtgaaatcataagcggtgactctatgcaagtctacaaacatatgaatattggaactgcaaaagtaacacctgaagaaatggatggtattccacatcatttaattgatatcttgaatcctgatgatacattttcagcatatgaattcaagcgattagcagaagatttaattactgatataacgaatagaggtaaagttccaatcatagcaggtggaacaggcttatatattcaatcattaatatataattatgaattagaagatgaaacagttacacctgcacaattatccatagttaaacaaaagttatctgcattagaacatttagataatcagcaactacacgattatttagctcaatttgatgcggtttctgcagaaaatattcaccctaacaaccgccaaagagtgttgcgcgctattgaatattatttaaaaacaaaaaaacttttgagtaatcgcaagaaagtgcaacaatttactgaaaattatgatacattattattagggattgaaatgtcgcgtaaaacattatattcaagaataaataaacgtgttgatattatgttggatcacggattatttagagaagtgcaacaacttgttgaacaaggctatgaatcttgccaaagtatgcaagctattggatataaagaattaatacctgtgattaacggacaaatgatttatgaagatgctgtcaatgatttaaagcaacattcacgccaatatgcaaaacgacaaatgacatggttcaagaataaaatgagtgttcattggttagataaagaaaatatgtcacttcaaatgatgttagatgagattacaacccagattaagtaaaaggagtccgacagatgattgcaaacgaaaacatccaagacaaagcactagagaattttaaagcaaaccaaactgaagtaactgtattctttctaaacggtttccaaatgaaaggtgttattgaagaatacgacaagtatgtcgtaagcttaaattctcaaggcaaacaacacttgatttacaaacatgcgatcagcacttatacagtagaaactgaaggtcaagcatctactgaaagtgaagaataagttgtaatcatatgggcacgatttaatgactcgtgtacataacgtttgaagtatgataaatagatatagaaataaagtcatatgtgacatcaattaaatgatgttcaaatgacaagatacaatagaggaatgtttgtaataaaaacgcttcatataaaggtcgagtcaatatatgatacgactttatatgaagcgttttatttgctatgagctagtatattttataataatttttctatttctctttcgatttgaacaggttttttttgaggtgcaaatcgtttaacaacgttaccttcgcgatccactaaaaacttagtgaaattccatttgattttctcattaaagaatccgtgttgtgccgcagtcaaatatctaaataaaggtaattgatgttccccttttacgtctattttttgatgcatagggaaggtaacaccatagtttaatttacagttttgagctgcttcttcgcctgaaccaggttcttggccaccaaattgattacaagggaaacctagaattacaaacccttgatctttgtatttctcgtataatgattgcaaaccttcaaattgtgaagtaaagccacattcgctagctgtattaacaattagcataacgtcacccttatatgcatctaatttgtaagtaacacctttatttgtttctactacaaaatcataaattgtctccattgtatcatcctttcgatttacttaaaatgtaccacaaaatcgtgtaatagtctttactaaaactctatgatagaatactttgagtaggattttattaaggagatgtataacatggctcagcaacaaattcatgatactaaaaataaactagaaaaagctgtcttagtcggtgtacatgctcaagatgataagcaatttaattttgagtctacaatggaggaattatcatctttatcagagacttgccaacttgaagtgttgggttaaattactcaaaacagagatcgtgtagatcgcaaatattatgttggtaaaggtaaaattgaagaaattcaagcatttattgagttcaaagatattgatgtagtcatcacaaatgatgaattaacgactgcacaatccaaatcactaaatgaagctttaggtgtaaaaattattgatagaactcagttgattcttgaaatatttgcattaagagcaagaagtaaagaaggtaaattgcaagtagagctagcacaacttgattatttattacctagattgcaaggccatggtaaaagcctttctcgtttaggtggcggtattggaactagaggccctggtgaaacgaagttagagatggatcgcagacatattcgaactcgtatgaatgaaattaaacatcaattgcggacggtagaagaacatcgcgaaagatatcgaaataaaagaaatcaaaatcaggtgtttcaagtagctttagttggttatacaaatgctggtaaatcatcatggtttaatgttttagcaaatgaagagacgtatgaaaaagatcaattatttgcaacgttagatcctaaaacacgacaaattcaaataaatgatggatttaatttaattatttcagatactgttggttttatacagaaactacctacgacgttaattgcagcttttaaatcaactttagaagaggctaaaggtgcagatttattagtacatgtcgtagatagtagccatcctgaataccgtacgcagtatgacacagttaatgatttaatcaaacaattagatatgagtcatatttctcaaatagttatttttaataaaaaggacttatgtgatcatgcatcaaatcgtccagcaagtgatttgcctaatgtttttgtttcttctaaaaatgatggtgataaattacttgttaagacgttatttattgatgaaatcaaaaggcaattaacttattatgatgagacaattgcgacgaataatgcagatcgattatattttctaaaacaacatacattagtgactgaacttaaatatgatgaaattgaaaatgtttatcgtataaaaggatttaaaaaataataaaaggacgaaattcaaatgaaagatataagtaagatagtagctgacgtcgaatcaacgttagcaccatattttaaagaaattgaagaaacagcatatattaatcaagaaaaagtattaaatgcatttcatcatgtcaaagcaaccgaaagtgatctacaaggatcaacaggatacgggtatgatgactttggacgtgatcatttagaagaaatatatgcgcaggcatttaaagcagaagatgcaattgttcgtccgcaaattatttcaggtacgcatgcgattactattgcattacaaagtttattaaaacatggtgatgaattaatttatataacgggtagtccatatgacactttacttgaagtcattggcgtaaacggaaatggtattgaaagtttaatggagcatggcgtatcgtataaagatattgcacttaaagaaggtaagatcgatattgaaagtgtgttagatggggtttctgagcgcaccaaagtaatagcgattcaacgttcgaaaggctatgatcaaagaccttcaattccgctagatgaaattgaaaaggtaattactaggttgaaaaacgtgcatcctaatattttaatatttgtggataactgttatggggaatttgttgaaagacgtgaacctatagaatgtggtgccgatttaatagcaggatcattaattaaaaaccctggcggtggtttagctaagattggtggatacattgctggtagaaaagatttaattgaacgatgtggttatagattgacagcacctggtattggtaaagaagcgggtgcatcattaaatgcattgcttgaaatgtatcaaggtttctttttagcaccacacgttgtcagtcagagtcttaaaggtgcattgtttactagtttatttttagaaaaaatgaatatgaacacaacgccgaagtactacgaaaaacgaactgatttaattcaaacagttaaatttgaaacgaaagaacaaatgatttcattttgtcaaagtattcaacacgcatccccaattaatgcacattttagtccagaacctagttatatgcctggttacgaagatgatgttattatggcagctggtacgtttattcaaggttcatcgattgaattatctgcagatggacctattcgtcctccttatgaagcatatgttcaaggaggattaacatatgaacacgttaaaattgctgtgacaagagctgttaatcagttgaaagaacaaggacttatataatagattaaatttcaccctaaatgataatgtgttttgggtgaaattttttgcggagatttatcagattatttttaaaaattgaaaaaatattttagctgtagattgttttatgtcgttttagaagtcgaaatcgcagttatatcaatgttttaagctttatgttagaaaacctgacatatttttgaaatcctaaaaaaattatgataagttattaacaagttcaaaagtagaggagaggaacaatgatatcgaatgatgcaatcagacgaaatatggctgtcttctctatgagtgtagtaagtaagttaacggatttaacgccaaggcaaatacgttactatgaaacacatgaactcatcaaacctgaaagaacagaaggtcaaaaacgtctgttctcactcaatgatttggaaagattactagaaattaaatcattattagaaaaaggatttaatatcaaagggattaaacaaatcatttatgactcacaagagcatttaacaacagatgaacaagagataagaaaaaagatgattgtagatgccacgcaaaagcctattggagaaactttgccaataaatcgtggtgatttatcccgatttattaaataaaatttggaggattttaaaatgccaaaacgtactttcactaaagacgacattcgtaaatttgcagaagaggaaaatgtaagatatttaagattacaattcactgatattttaggaacaattaaaaatgttgaagtgcctgtaagccaattagaaaaagtacttgataacgaaatgatgtttgacggttcttctatcgaaggtttcgtacgtatcgaagaatcagatatgtacttacatccagatttagatacttgggtaatcttcccatggactgctggacaaggtaaagttgcacgtttaatttgtgatgtatataaaacagatggaacaccatttgaaggggatcctcgtgcaaacttaaaacgtgtattaaaagaaatggaagatttaggcttcacagactttaacctagggcctgaaccagaattcttcttgtttaagttggatgaaaaaggggaaccaactttagaacttaatgatgatggtggatatttcgatttagcacctacagatttaggtgaaaactgtcgtcgtgatattgttttagaattagaggatatgggcttcgatattgaagctagtcaccatgaagttgcccctggtcaacatgaaattgactttaaatatgcagatgctgttacagcatgtgataatatccaaacatttaaattggttgttaaaacaatcgcacgtaaacataatttacacgcaacatttatgcctaaaccattattcggtgtgaatggtagcggtatgcactttaacgtttcattattcaaaggtaaagaaaatgcattctttgatccaaatactgaaatgggcttaacggaaactgcatatcaatttacagcaggtgtgcttaaaaatgcacgcggatttactgctgtatgtaacccgttagtaaactcatataaacgtttagtacctggttatgaagcaccatgttatattgcatggagtggtaaaaaccgttcaccattaatccgtgtaccatcttcaagaggattatctactcgtatcgaagtacgttcagtagatccagctgcaaacccatacatggcgttagctgcaatcttagaagctggactagatggtattaaaaataaattaaaagttccagaaccagttaaccaaaatatttacgaaatgaaccgtgaagaacgtgaagcagtaggcattcaagacttaccttcaacactttatactgcattaaaagcaatgcgtgaaaatgaagttattaaaaaagctttaggaaatcatatctataatcaatttattaattcaaaatcaattgaatgggattactacagaactcaagtctctgaatgggaaagagatcagtacatgaagcaatattaatacgctaaacaatgatgggaaatcagtaatatcaagggctagagcattttgctttagctcttttttgatttggaaagatgggatttcacttgaccacttttgttaaaaaatggatttggtcaagttttggtcaagtaaatgttttatgtatttatttttttaaagctggggaagaccattttatattttagttcacatgaattttaatatatttggaggtgatgagatgaggcgataaaagaacgtcgcgaaaacgttgagtattacttgaaaatagccatattcatattacttctcatcgaattcatttgcagaacgttctaaggtaagaccccgaaaagagggaccttactacgcattattaagggggtaatactatatgaaaagagaaacaaaacaaaaaatatctttttgtttatcgatcggtattttcattttagttatactactattgatattctaaaaaattaaaaatttcgcctcatctaatttatgaattgctatgatgaaatattcaatacaatcaaagaattgatagaaaacaaagagatatcgagttatcaaattaataaagatactgggataagttacggtaatattaatgctatgcgccgtagagaaagaagaatagaaaatttaagcttaaagaatgcaaagatcttatatgaatatgcgaaaaaggtattgtaatataagcattgagttcaataggcatacaataactgcccaaactagtgactgagtgggtgcttttatagtattaaaagttttctaaaagtgaaagaaatcatgtttagtgatttacttatgtttttcaaaatagtataataattttatataatatatagagcttcagtataccttttgagtatatatggagttctttctttttatacaagatgtatatgtataaatggaaatatttaatacattacataaaaacctttaggtgcacttagagggatgttaatcataaaaaaagagattttgaaaaatataggctattatactttagaattacaaattataaatcttgccagtggatatgggagttcaacatgtcacttaccccaatttgtggaatgttaaataactataaagaggaaaggagaaaaaatgataagaatggttaaagaaaaagaacgaatagcaaaattaaatttcgaatagctgtgacgagcttaataattcaagtacttaattttatcaaatcgttcttttaaaaaggtaaagggcaaaagacctttaccacattaaatagggaggtggtatttatgacaagagaattaaggaaaaaattaactctctatcttaacattgcaactttaatattatttattattaatttaactagaaaaaaataaattattctttcattttgacaaaaattatgaaccagtttaaagaaatttataatacaatagaaaaattactaaatgataaatcaatatctaattatagaattaatcaagacactgatgtttcttatggtggtataagtgaattaagaagcgggaaaagaaaagtgaataatttaactttagaaacagcggaaaaactctataattaccaaaaacaattagaaataatgattgaagattaaaataaggccatatttttgaaatatcatggagtgagccttttaagtcatctaattttaaagtatattaaatatggataacttaatgtgaatataaataaaaaattatcaaataatatagaatagatggagacaagaaattttatcaatatataaaaaaaacgccaatactattaggtattagtttatgaattaactagtttggcaactagaaaaaaacaatgtattgctaaacgtagttactgcattaggattattataattataaatagaaagagagtgtgattaataatgaatgagattgaaactattataagtgaaatagaaaagttattaactaacaatacaccatatagtatttcaaaaaactcaggtgtaccacgtcaaacagttactgatttaaaggtaggtaaaactaaaataaaagaagctaaatttaaaacgataatcaagttatatgaatatcaaagaacattagaaaataaaacagaatgttaacaaaaatattttgttaggttaggtggacaagaaattaaatttctaatgatttcatggttgtctgtccacgttttgtccacctcaataagataatctcttagttttagaaattgtacatggttaaataatcaaaaatgcatattatgaaattatcattgccattaaatcttgaatgatctttaagcgatgatataaaaggctgaacacagtaaataagttaactttaatgcagtattctatactatacatattttgtaataatgtttatgcacataatttttcattgacaattttttatattaaattgtgtaattggcatatatgatgatttgtgataattatattgtaatatagcatttggttttatgattctaaaattaatagatttgaaaagtatactttatttcatgaaagtttttggtacatttatttgaaaatgtttttattacaaagttacatggctaaatgtttcttaacaaaattaatttttcgagtgtaaagaatcgtgtggtaaacataatttatatagattataaggaggtgaaaatggtcgaggaagttaaaacgataaaatagtttgaatgttttgatttcaattctggtaggactattgaatttgcaatctaataagaatgtgaggtttgatttaatatgaagtcatattctttgaataaaatattactttctcaccattagtaaaatgaagatgactattaaagtgcgaaaaacaaataaaaaagagaaaatagaatttttaatagggacgtttataattattttagtaatattagggttcaaaattatgaaataaatgtatagtatttgagaagtctatatgactccggaaaaattaaattctaaagatatctcaatatctcaaatttaatagactactggagttagtagtttgaatattgaaagacactaatctaataaaaatacataaaaggttaaactttagaagtggctgtaaacttcaatgaatactaaacattgaagttttgtaaaaggcgtaaggtatacaagacaaatcgtttatctttgacaaagtaattgatgatgaaaagtcgttaatatgtagaaacaaaaattgaaaatataaaatttaactattatgaagtgatgatagccattaatgaatagaaaaataataaaatcatttatagataaaaaatacgttaagttcacagaatttcgaaaaaaagcagaaaacattgtacagatatggagatgaaaaaatgtcagaatacaagaaaaaaataattgaattaattgaaagtaatttaacaggatatgaaatttctaaaaaaactggagtttctcaatacgtactttcacaattaagacagggcaaacgcgaagtagataatctaaccctgaatacaacagaaaaattatatgaatatgccaataaagttttgtaatttaactaatgtataaattaatcaagctatgtttatttgatttaactattaataaaaatcatatggtgaatggatattataataattaaaatacaaaaatagtagattccaatttgtgaaaaaggagtatgtcgtttcatttagaatttattgcacgaaattagcatcgaataagggaaaataagtgttaagttttaaatgataaaaaagattggaatggatcgtcttgaaatgctcccttcaaagttttcattttttcaatgtcgacttcgaagggggcattttcattaaattgttatagctttttatatttgtataatgaacatataagtttaagaaggtgcgagtgaaggaaataaaaaagctcaaatgtaccaaattgttaatcttaataaatctctactttataaagattgaatggacattcgagcgttaatcagtcaggagggactttccctcctacaatttaataataatacttgcttcaccactatacaaggagtgagttgttatgttcaaagtgaattattcgattttaagttattatccagaatataatatcgcagtaagttggcaacgtttaagagaaggaaaaacaataaaaaacaagatttaatactgctgcgtcatgaggcgcttgaacattatttgatgaataagtataatttcaactatgattatgcacataaaattgtatcaaaaaaatacgattattcaatttttataaaaaagaaggtggattaaatgcttacattaataaaattgaaagaagatgaacaggttataatatatgaatatatacctgaagatgatataagtaacggtaaaggttcagtaacttttaataaaaaagatgcagaggttatagattcctcattatctgaaatagaaaatgaagaatattttatgttatatcgtaataagtctttttctgtagtaagagactttatcgagaagcaagaatttcccgaaaattataaaatagcatggtattaaagcatcctttctacacagataaagagaaagcgatgctatttttatatgcttttttcattattcgttgaaaaagaagagtcacaaaagttaacatatttaaaagaacttggtgaagatggcgaatataaatatgttgccaaaatagatagtaaaacatctaaattatgtcattcactcaacggaaaaatatttaaagttaaagatatgataccaggtgtgaatgcgccacctatgcatccttggtgtagaagtaccacagtgccacatgtcggcaattggcgagacaagttctttaaagagcgtgaaggtaaatatcaagtagaaggttgttttattgaatcaggtgcacttaataataaaagtgatgaatacggtatcaaaaggaacagacatgctcaaatttattataattcagttagaaatcgagataaacagatagagatttctaaaattgctaaaaatactaatataaataaaaatttaattcaaagagtttatgaacatatatttgaaaataagtatttattagaaagtggatttaaacaatttgatcctgacttttatatggctcaaagttggcaacgtttaagagaagggaaaaatattaaaaaaatggatataataatgtagaaacatgaagctcttgaacactatctaatgaataagtataatttacactatatagaggcacataaacttacagaaataaaatataattatagtattttaattaattagaggtggaaatgattgctaatattaaaaataaaagaaattaatgataaaagtgttacatataaatattttcctaataatgatgaaaatattaagcctggtattattcaaatggatatagatagtcttgaagttatcaatgctgaaaaatctagtttagaaaaaaatacaagagataattattttattcatgccatagacagaatatacataaatactagtaaagggctatttcctgaatctgaactcgtagcatggggataaagaaagtttactttaaaaattttaaccttcaaatgtgaaggttattttttattgtccaaaacgtgctgatgacattttaaaagcaagtatggaatatcagtcgacagactataaacggaggtatatctcatggaaaacaatgatagcaatgaagtagcttatttgttaaaagatggtaaatttacaaaagtatatgtcaatcaagatagtgtatcttttgtgccagggtaacaagcaaccgaattattatttaacagtaaaccgaattcaattgttatgttacataaccatcctggacagtcaggattttcagaatatgatttatttacattttttaagcatccatcaataaaatcaatgacaatcgttactaataagggacaagtaaaatttattaccaagtcaaataggtttcatggtaaaatagtgagtaaattttgtgctaaatattttacgcatattaatatcattaatgatagccatattgaaaaattattgaaaaaactttatagtataaatatgattaaatataaagtgagatgattttaattatgttagattcacaattagatggaaatgtaactgcaaaagaattgagtgaatcttttaaagaattagttgaagaatttgaaagtatagaaaaagcgaaaaagaattcaaattcaaaagataaatagcatcctttttagacagataaagagaaagtggtgctatttttatacgcttttttaactatttactgaaaatgcagaagcacaaaagttaacatatttaaaagaacttggtgaagatggcgaatataaatatgttgccaaaatagatagtaaaacatctaaattatgtcattcacttaacggaaaaatatttaaagttaaagatatgataccaggtgtgaatgcgccacctatgcatccttggtgtagaagtaccacagtgccacatgttggcaattggcgggacaagttctttaaagagcgtgaaggtaaatatcaagtagaagtaaaagaagcataattacaggaaaaagctaaaaaccagatgaaagaaatgattaaaaatggtaaaataaaaatagaaataaattgcggaaaaataaaatagatatatgttaggtcatcacctatataatgaaaataaaaaaagagccattttaaataataagaaattgcctagctatacaatactttctatagatttattgaatgaattgttaagagaaaaaatgtcaacaggcaatctaatattaagtgatgagcgatttgatttgaaagagattattaattttaatcaaattattggaaaaatacatatcgaaaatgtgtatattgaaaccagaaagggaaaagtgcattattcgaagacaggtgctcatatagtaccttatattgataagtaggtgaaaagtattgagaattgaagatgcatatcgtaaagatgttattatcacgcttttgaataatgaagaatacgaagggtttgtaactgactatgaaaatgaattcgagagcgaaacaggaaatcttgttgtagatatacagactgattttgctgtttattcgtttgatgaaactgagataaaaagtattagattattaaaataattacaaaatagcatcctttctacaaaaagctaaaaaagaaatgcttgaaatgataagtaatggtaaaatgacgatgaaattgaataatgttaagcaaaagcgtcatattttatgcacaaatgaatataataataagaaaaataattcatctttattaccaagttatactataatagattctaatgaaagtgaaaagatgactaaaaaagaatttattgatattccagttttgtttgatgatgaagggaattttagaataaaacaagttatagattataaaaagataataggtaaatcttatgtgaatggtaaatatattgaaacgaaattaggtaaggttcattattctaaaactggttttcatgtagttccgtatattaaaaaggagtgattaaatatgaatttacagtcatacataggcaaattagtcaaattaacgcttactaataataaaatattaattggaaaagtgatagactttgatgataaagttgataattttgatggttataattcgatagaaattgatacaggtagaattacatatgatatatcagaaaataaaattaaaactattgttttacaataatagcatcctttctacacagataaagagaaagcggtgctattttttgcgcttttataacaactaaggatacaagacacataacttcaacaatatcctcatctaaacctatcgatttcctaagctcaattttaaacacaaagtttatttgaaatgatgcacacctataaaaatcttaatcatcgaaaagtcacaaacatctccatattaaaaacttaaatagtgcattccatttaaactaaacatcgatattcctaccaatatagacttagtaattcgattgttaatacattactttcataaaataactacaaccatcataatacttctcaaatgtcgtcaaattaaagtaaatacagcacaaattaacatttttaaatatataaaataaaacaagatactcaataatctgtagtaccttgttttggaataatgtaattttatatcatcaacggctacaaatgagcagtttcatatataaataaacacatctactcaactgatcttaattaattaataaatgatttaccagatgacatataacagcattattagattaattctaatagtttatttaaattttcttcggttgtcgcccaactggttgcgaatctaacaacacgatgttgatcatcgtatttttcccaaacagcaaatttaactttttgttctaactctgctattttctcgttacttaaaataaaaaattgttgattggttggagaatcaaagtaaagacgatagcctttatttttaaacccgtctttcatcttatttgccatttcgatagcatgtctgcttatattaaaatataaattgtccgtaaataattctaaaaattgtatgcctgttaaccgtccttttgctaaaagggcaccgtgatgcttgattcgagtggtaaattgtttcggttcattatttttcgtaaaaacaatggcttccccgcataatgcacctatcttcgtaccacctatataaaatacatcacaatatttagcgatgtctttaatagtcatatctgattggtcactcatcaatccataccctaatcgtgcaccatccataaataatggaagctgatattgcttacatactttgcataactcttccaattctgatttagagtataatgtgccatattctgtaggatgagaaatatataccattcctgggaataccatatggtcctttttaaaatcacttttaaatgtctccatgtaagtttcaacatctgaagcactaacttttccttccttagagggtatagtaattactttatgtccactatattcaattgcaccgccctcatgcacagcaacatgaccagtgtctgctgaaatgaccccttcgtaactttctaacattgaattaataacaacctgattggtttgtgttccacctactaaaaaacgaattgtagcatttggacagtcaattgtatctttaatcttttcaattgcctgagctgtgaattgatcaaagccatatcccgaagcttgtacaagatttgtatctactaatcgttttaatactttttcatgagcaccttctaaataatcattttcgaatgaaatcactacatttccccctaaaactaatatcaacattttaataagataaaccaatttcaaaactagttcgatatttaaaatgtattatgaatggttaaagtttgtatcgcattatcgcgaagttgaataaatatattatacatcaaacaatacattatgaaaattaattaattttttatcacagcgacttttcatgctggaacacatgtattaatgattgaattttactgttaaaagttctatgatttaggaaatagagaaaagaggggatttaaatggaacaaattaaacttaaaacttttacagctgagactttagagttattagaaaaaaacattaatgcttttttaagttctgaagaagctacaaatttaaaattagtaaatattactattaaagaaatagaagaaagaacattcccaaataatgaagaagaattcaatgcaattttaactttatctgtgaataaataatatgacgtgaaaggtgcaaaatgtttttttgtgcctttctttataggagaaaagactatgcgatttacattttcaaacgatttaggaacgttatttactattattttagctattggattcatcattaatttagtattggcttttattattatctttttagaaagaaataggcgtacagcgagttcaacttgggcatggctatttgtactttttgtcttaccattgattggttttattctttacttgttttttggtagaaccgtttcggcacgcaaattgaataaaaacaatggtaacgtgttaacggatttcgatggacttttaaaacaacaaatagaaagctttgataaaggtaattatggtactgataacaaacaagttcaaaaacatcatgatttagtacgtatgcttttgatggatcaagatggttttttaactgaaaataataaagttgatcatttcattgatggaaatgatttatatgatcaagttttaaaagatattaaaaatgcaaaagaatatatccatttagagtactatactttcgctttagatggtttaggtaaaagaattttacatgctttagaagaaaaattgaaacaaggtctagaagtaaaaatattatatgatgatgttggatctaaaaatgttaagatggcaaattttgatcattttaaatcgttaggtggagaagttgaagcattttttgcttcaaaattaccgttattgaatttcagaatgaataatagaaatcatagaaaaatcatcgtaatcgatggtcaactaggttatgtcggaggatttaacattggtgatgaatatctaggattaggaaaattaggatattggagagatacgcatttacgtatacaaggggatgcggttgatgcactgcagttgcgatttattttagactggaattcgcaagcgcaccgtccacaatttgaatatgatgttaagtatttccctaaaaagaacggaccattgggcaattcaccaattcaaatagctgcaagtggcccggctagtgactggcatcaaattgaatacggttatacaaaaatgattatgagtgcaaagaaatctgtatatttacaatcaccatatttcattccggataattcatatataaatgccattaaaattgctgctaaatcaggtgtagatgtacatttaatgattccatgtaagccagatcatccattagtatattgggcgacattttcaaatgcctctgacttattatcaagtggtgttaaaatttatacgtatgaaaatggatttatacattctaaaatgtgcttaattgatgatgaaatcgtatcagtgggcacagcaaatatggactttagaagttttgaattaaattttgaagtaaatgcctttgtatatgatgaaaatcttgctaaagatttaagggtggcttatgaacatgatattacaaaatcaaaacaactaaccaaagaatcatatgccaatagaccgctgtctgttaaattcaaagaatcgttagcaaaattagtttcgccaattttataatttatttgtaaggagtctcgattatagaggctctttttattttgcccaaaattaaaataacgataaatatattatgtaaatctaataatgacatttgtcatttcaaatctatgacaaagtgttctattttaaatctaataaatttactaatattaaattaagaaaaaaatagaggtgattaaattgattcaaatatctaatatcaacaagtcatttaataaaagatgtgttctaaaaaatatttcgttcgatattgaacaaggtaaatgtatcgctttaattggaaaaaatggtgctggaaagtcaacgttaattgatatattaattggtaatgttaatgctaattctggtgagatatttgataaagacaagttattacaaagtgaaaatcgcagtataatgttccaaaaaacgatgtttccagatcaattaaaagttattgagattatcaacttatatcaatcattttacgaaaatccattaccattggaagaaataatagaactgacgaaatttgattctagtcaactgaaccaatttgtaaataaactttctggtggtcaacaacgattactcgattttgtattatctttaatcggacaaccacaattgatcttattagatgaaccaacatcgactatggatatagaaattagagaatatttttggtcaattattgaaaatttaaaagaagataatcgaacgatactctatacatcgcactatattgaagaagtcgaacgtatgtcagacaaaattattctcattgaaaatggagaaataatacttaatgattcaacgtcacatattagaaccaatcagcaatctcagattacgttatccgatgaatatataagaaagttaaaactagataaagatgatttagttattcaaaaaaatcataatggcactatcaaaattattacttcaaatgtaaatgatacgattttatatcttcaacaacttcatattaatttggatgatattgaaatacaaaaagtctcaattgttgattcatacttcaacaaaaaaaagcaaaggggatctaattatgatactaagttacttgaaaatcgaatttaaagttataatgcgtaaaaaaacaacattaatattatctattttatttcctgttatattctatatattatttacttcgatattggaattgccggaagatgttaaacctaaattttataaagagtatatgtatagtatgacggtttatagtttgttaagttttagtttactaacttttccattagatattattaatgaaaaacaaaatgaatggcgccaaagattaatggtaacaccatttacttttactagttattatatttcaaaagtagtgaaaactatgctgcaatttgcaatagcgatattagttatttttatggttggacatttttataaaggtgttgcaatgagtgcagttcaatggttagagtcaggaatatttttatggttaggtgcgtctctattaataacttttggcatattattttctttgttaaatgatattcaaaaaacaagtgctttagctaatatcgtaacaattggtttagcagtattaggtggattgtggtttccgataaacacatttccaaattggcttcaacatgttgctcatgttttaccgagctatcatttgcgtaaactaggtgtagatattgcttcaaatcatcatatcaatttaatatcatttgctataatactcttgtatgctttagggagtataatagcagtatattgtattagtcattttaaaagggcggaataaaatatgaaatttttaaaagatacttcaattgctgaaatatcgtctatactttatctgatttttcctattgccggtatattttttaatgaagtatatggtcccaaatggttgtatattatatcagtcattgtcttttcgttgtcgtatcttatattagttatagtaaataatagacttaatacattaatgttttacattttgttgattattcattattttattatttgttattttgttttcagtgtacatccaatgctaagtttgtttttcttttatagtgcttttgccgttccatttacttttaaaaataatgttaaaaaaacggcaactaatcttttcatactaacaatgattatatgtacaataataacgtacttattgtataacaactattttgttgcaatgatggtttattatgtcgttatatcgttaataatgctagataattttaaaaaaatgaaaaaccgtgaatatcaaaaagaaatagcagaaaaaaatagacatattaatacattaattgctgaacaagagcgacatagaattggtcaagacttacatgatacgttagggcatgtgtttgcaagtttatcattaaaatcagaattagcttataaactaatagatgctgatgtagaaaaagtaaaagctgaattattagcaattaataaattatctcgtgaatcattgaacaaagttcgagaaattattgatgatgtaaaattaccatcatttattgaagagattgatagtatacgtaaagttttaaaagatgctgatattgattttacatttgaaaataaagaattagcgcaagtattaagtcctactaaacaatctatgttagttatgattacgcgtgaagcgataaataatgttattaaacatgcaaatgcttcaaaagttcatggtaaattaaaaactgtaaacaatcataaattactgcttatgattgaagatgatggcaaaggtatcgatagtgattgtgaggtgaaaagtatttcacagcgtgtacaacatttaaatggaactttagcagtcgactcaacaaatggaactaaaataatcattgaaatctcaacaggaggaatagcatgacatctttaattattgcagaagatcaaaatatgttacgacaggcaatggttcaattaattaaactacatggtgattttgaaattttagcagatactgataatggtctcgatgcaatgaaacttattgaagaatataatcctaacgttgttattttagatatagaaatgccaggcatgactggacttgaagttttagcggaaattagaaaaaagcatttgaatattaaagtgattattgtaacaacttttaaaagaccgggatactttgaaaaagcagttgtgaatgatgtggatgcatatgttttaaaagaacgttctatagaagaattggtggaaaccattaataaagtaaataacggagagaaagaatatagcgccacattgatgacttcattttttgtagataaaaacccattaacgcccaaagaacaaattgtattaagggaaattggcaatggtttaagtagtaaagaaataagtgaaaaattatttttgacagatggaacagttagaaattatacatctgttataattgataaattatttgcagataatcgttttgatgcttggaaaaaggcaaatgaaaaaggctggatctaaatacaaacaaaaaagtattgagtgttttgatttaagagacttggaaagtgagtcaataatcaaaatcttactcaatacttttattttggtactcgcaatttagatttgttaactaattttttcgcttattataaaacgaaacaatcaagtaaacgataaagcctacaaagatacccaataaaatagatagtactgccgtcactattaatggtaatttgaaaaatatttgtaggaaaataccaatgataattgcgataattactgcaattaatgtgactgtattttcatttgaaatgttcatttattttcactccttaacaataacattatatcatgctatagctttccaaaatattgaaatatgtagatatggctattgacgatatttcttaacttttatatgattaatcggaatgaaaaaagagaagtaggtggcaatatgaagtcaaataaatcgcttgctatgattgtggtagccatcattattgtaggtgtattagcatttcaatttatgaatcatacgggtcctttcaaaaaggggacgaatcatgaaactgtacaagatttaaatggtaaagataaagtacatgttcaaagagttgtggatggtgatacatttattgcaaatcaaaatggtaaagaaattaaagttaggcttataggggttgatacgccagaaacggtgaaaccgaatacgcctgtacaaccatttggcaaagaagcatcaaattatagtaagaagacattaacaaatcaagatgtttatttagaatatgataaagaaaaacaagatcgctatggtagaacattggcgtatgtatggataagtaaagatcgtatgtacaataaggaattagtggaaaagggacttgctagagagaagtatttttcaccaaatggcaaatatagaaatgtatttatagaagcacaaaataaagctaaacaacagaaattaaatatttggagtaaataattaaataggtgattatatatattaaagtaaaatatacttgaagcatcgatttattattaccataaatttatatatagaaataatttaaaggcataataaccatagtgcgtatcgagcgtaatggattattatgcctttgattttacttgaatatagctgtgatttgatcaacctgttctttatttaaagggtgtttagatagctctatggcttcgctaataatacgtcgtaacgaagattttgttgaaactgtatcaacatatttatctctttcttcagaaccttgaatgatattaactgtaccatcactaaagtaaataacaccggtactttggactttaaagttaaagttttgttcaatatgatcctttaatgctttcgcattatttgctgctaattgatacggatcataatcataaaaatcataaataacacgatttggttgaactgtttctgtaaaagtatagatagactttcttgatgaattaaactgatcatgatattgctggctaatgtaatgaccgacaactttttcaatattactattgcttatttctgtatcatgctcatcaggtacatcaaagtgataaaatgttttttcaccccagctttttacatcaacgtttattaaaccgatatctgaaacaatgataaaatcaaatgaacgtgcatactcgaaaaacggatgtttagtagctaaattgcttgtaacgataatatcgtaatattttaatttaccattttcgagatagctatctaaaatcttgcgtaattctcttttagcatttttgtatgcatggtggccaacatcattattagaactcagcatttgacttcttaattcagcattttctgcacttaatgctttgttctttttaataagttgctttcttgcataaacttcggtatctattttactattactatacctttgatttaaaactaatataccaattaatgctacaatgataatgataagtacaacataaaaagacattttttcaccaatcctttttgacttctttaactttgtatacaataataattaataaagattaattgttattcaatttcccacatttttattagttgattttagttcatcattgttataatcaaattataaactgacagatattgatgttcaatgaatatgacgtgaaagattcgtgaattcaagtttatgtcgaatttatgttataacggtcatttaaatgacagaattaggtcactcatagtattttgaagattgaattcattaattttaaaatgtataatgatatttgtgaaagcgcttgcttaggaggtgtatttgagagtgaatgaaatgaatgctaaagaacaattagtggacaatttaatgaaaacatcatcgcaattatttaaatttcacggtgaagttgccatgcagcttttcttaaatgatgaattaaaattaccttctattgttgaaatatgcgtggaacgtaagcgtttaagtgatattgtgaaagttattccgcaatcatatgcgttactatacatagataagcaagatcaagcaatagctaaagaagatttatcactttcaaaaattgcaaaagtttatgtgcaatatgatgatacaacaataatgagtattttcgtttatgatgtagtaaacgatgaatggatttttagattggatccgaatatacgtatacctaagagtaacatatacttccatagtttaaattgggatgtggattatattaaaccggagatcgttctaatgtatgatctaatgcaacaccatcagtatcatcattattccaattataaacgagtcatagatgcattaagctactatcaattttttattttaaaatttgtagtaggtgagcaacgtattaaggatgcaatccagagaacaataaataattaagaaaaagcaattcataacgcagttgaatacatgtgttacgaattgcttttatattagtttttatcacacaagttttttaatgcaaccccgtgatagcaaaactcatatgtagataatacagctttttcagcatcatctacatgaattccaaacatcatcgagatttccgaagcaccttggttaatcatttttaagttaatttttgattcagctaaggcatgtgtaattttatttgcagtaccgatgactttattcataccttcgccgacaatcattaatattgctaaatcatgctcaatacttagctcatcaacatcacatttttgacgaatttcatttaatacttttgtttctttattttgaatttgttttgaacgcataacgatactgatagtatcaatacctgaaggcatatgatcaaatgaaatattattatcctctaagacacctaatatctttctagtaaagccgacttgtctattcattaaatactttttgatattaataacggtaaaatctttatcacaacttataccgctaatcacatttttcgcatttatttctctatcatgcactataaatgtacccttatcttgagggcggttcgtatttttaatcaccacagggatgcgatctttataaagtggttgtaaggcttcatcatggaaaacactaaaaccagcataagataattcacgcatttctcgataagtgatttcttcgattaattcaggatctttgatgatatttggattagctttataaataccagacacatcggtgaaattttcataaattgtggctctaacaccacttgatatgatggcgccagttatatctgatccgccacgtggaaatgtaactatatatccttcatgagatacgccaaaaaatcctgggataattagtttttcatcataatctcttaattttttaatttcagagtaagtactatctaatatttgtgcttcttgtgggacgtcagtaacaaaaatacccgcttccttcggtgatatatattttgttggtataccttgactattattatataaagctatcaattgcgcattaaaatcttcaccacaagaaagtaatgcatctaatagtctctttggttcattttttaattgattaatataatgttccaaagtcacatctatcgtccgtaaaatactttcatccatttgcaattcttttacaatatcatcataacgctgaataatttctctttttttatcatgataatcaagatgattaatgaccttttcatataatctgattaacaaatcagttgttttaatatcattatcatgtcttttacctggagcagaaacgataacaatctttcgctctggatcagaattaacaatatttaaaacctttttaatttgagtagcattggagacggagctaccaccgaatttggaaactttcatagtgcatgccaacctttctaaaaaatcagaaaattgtattcagttttgtaagtaagaatgatattatgtatttatattttgaatattacgaactttacaaaaataaagaataattctatactatactatcatctagtgtttttcaataatacatttgtttttctcaaaagcacaaacggaggtacataaaatgaaaaaattaaatatagcattattaggattaggtactgtcggatctggtgttgttaaaatcatcgaagagaaccgacagcaaattcaagatacattaaataaagatattgtcataaagcatattcttgttcgagataaatctaaaaagagaccgctaaatattagccaatatcatttaactgaagatgttaatgaaattttaaatgatgattcattagatattatcgttgaagtcatgggaggaattgaaccaactgtagattggttaagaacagcacttaaaaataaaaaacatgttattaccgcaaataaagatttattagcagtacatcttaaacttttagaagatttagcagaagaaaatggtgtagctttaaagtttgaagcgagtgtagcaggtggtattccgatcgtaaatgccataaataatggtttgaatgcgaataatatttcaaaatttatgggaattttaaatggtacctctaattttattttatctaaaatgactaaagagcaaacgacatttgaggaagcacttgatgaagcgaaaagacttggttttgctgaagcggatccaactgatgatgtagaaggggtagatgcagcgcgtaaagttgtcattacatcatatttatcatttaaccaagtcattaaattaaacgacgttaaacgaagaggaattagtggcgtaactttaactgatattaatgtagccgatcaactggggtataaaattaaattgattggtaagggaatatatgaaaatggcaaagttaatgcatcggtagaaccaacgttaattgataaaaagcatcaattagcagctgtagaggatgaatataacgcgatttatgttattggtgatgccgttggtgacacgatgttttatggaaaaggagcaggcagtttagcaacaggtagtgccgttgtcagtgatttattgaatgtagcattattctttgaatcagatttacacacattgccaccacattttgaattaaagacagataaaacacgggaaatgatggattcagatgcagaaattaatattaaagaaaaatccaatttctttgtagtagtgaatcatgtcaaaggttcaattgaaaattttgaaaatgagttaaaggcaatattaccatttcaccgatcattaagagttgcaaattacgataatcaatcatatgccgctgttatagttggattggaatcatcaccggaagaattaatcactaagcatggatacgaagttgacaaagtatacccagtagaaggagtttaattataatgagaagatggcaaggattagtagaagagtttaaagcacatttaccagtaaatgaaaatacaccaaaattaacattgaacgagggaaatacaccactcattcattgtgaaaatatgtctaaaatactaggcatagatttatatgtgaagtatgaaggtgccaatccgacaggttcatttaaagatcgcggtatggtaatggctgtgacaaaagcaaaagagcaaggtaagaaaattgtaatatgcgcttcgactggaaatacatcagcgtctgcagcagcatatgcagcgagagcaggtttaaaagctatcgtcgtaataccagaaggtaaaattgcattaggtaaattgtcgcaagcagtaatgtatggtgcagaaatcgtttctattgaaggaaactttgatgaagctttagaaattgtaaaagaaattgcaaaaagtggcgaaatcgagcttgtaaactctgtcaatccatttagaatcgaaggacaaaagacaggctcatttgaaattgtacaacaattagacggtgaagcacctgatattttagcgattcctgtaggtaatgcaggtaatattactgcatattggaaaggctttaaagaatatcatgaagctaaaggatcacaattgccgaaaatgtttggcttccaagctgaaggcgcatcaccaattgttcaaaataaagtcattaaaaatcctgaaacgattgcaactgctattcgaattggtaatcctgctagttgggataaggcgactaatgctcttaaagaatcaaatggattaatagatagtgttactgatgatgaaattctagaagcatatcagttaatgacaactaaagaaggtgtctttagtgaaccagcgagtaatgcttctattgcaggtttaattaaattgcatagacaaggtaaattacctcaaggtaaaaaagtagttgctattttaactggtaatggattaaaagatcctgatactgctatttcactactagataatccgataaagccattgccaaatgataaagatagcattatcgattatattaaaggagctttataacatgtcgaatgttttggagttaacaattcctgcatcaacagccaaccttggagttggctttgattctataggtatggctttagataaatttttgcatctgtctgtaaaggaaacatcagggacaaaatgggaatatattttccatgatgatgcatctaagcaattgcctactgacgaaacaaactttatttatcatgtagcacaacaagttgcttctaaatatagtgttgacttgcctaatttatgtatcgaaatgagaagtgatattccattggcaagagggttaggttcgtcagcttctgctttagtaggagctatatatatcgcaaattattttggtgatatccaactgtctaaacatgaggtattacaattagcgactgaaatcgaaggacatcctgataatgttgcgccgaccatttatggtggtttaatcgctggatattataatgatgtctcgaaagaaacgtcagttgcacatatcgacataccagacgtggatgtgattgtaacgataccaacttatgaactaaaaacagaagcatcaagacgtgctttaccacaaaaattaacacatagtgaagcggttaaaagtagtgcaattagtaatacaatgatttgtgcattagcacagcacaattatgaattagcaggtaaactcatgcaacaagatggctttcatgaaccgtatcgtcagcatttaattgctgaatttgatgaagtgaaaacaattgctagtcaacataatgcctatgcaactgtaattagtggtgctggaccaactattttaatatttagtcgtaaagaaaatagtggggaattggttcgctctttaaatagtcaggtagtatcatgccattctgaattggtcgatattaatatcagtggtgttaaagaacgaattgtataccaatagacgctttatattgtaaaatagtattaaatgcagaatagagaggagatttaatgcgatatgacaaattataaagttgtcgttttagatatggatgacacattgctaaattcagataatgtgatatcagaagaaactgcaaattatttaacagcaattcaagatgaaggttattatgttgttctagcatctggtagacctactgaaggtatgattccaactgctagagatttaaaattacctgaacatcatagctatattattagttataacggtagtaaaacgattaacatgactaatgaagaagtagaagtaagtaaatcgattggtaagcaagatttcgatgaaattgtagattattgtcgagatagaggctttttcgttcttacatatcatgatggtcaaattatttacgacagcgaacatgagtatatgaatattgaagcagaattaacaggtttaccgatgaaacgtgttgatgatatcaaagcgtatattcaaggcgatgtacccaaggtcatgggtgtagattatgtagcgaatattacagaagctagaattgatttgaatggtgtgttcaatgataatgtagatgctacgacaagtaagccattcttcttagaatttatggccaaagacgtttcaaaaggtaatgcaattaaagcgttatgtcacaaattgggatattcggtggatcaagtcattgcttttggtgatagtatgaatgataaatcaatgtttgaagtcgcaggtctagctattgctatggggaatgcatcagatgaacttaagcaatatgcaaatgaagttacgttggatcataatgaaaatggtattccacatgcgctcaaaaaattgttataaattttaaaataagccttaacacatgatatttgaataagatatcttgtggttaaggctttttatttttgtgaaaatgacttcagttatactatggaggatttgaaatacatattttagattagtaatgatatcaaacgaatagagtaaatgtatattttttgaataaatcaagtattaactagtcacggaaggtagataaataaatttgatcattctgaataataacgaatgcattaaaaaatgcagtgacaatctaacattaattgttaaaatcactgcaagcatcttgattttatttagctgtttgtgtccagtcatgcttacctctgaaacgttttacatgagcatatatttggtcagcagtataatctaaatttgtataaactgtaatactgaacgctgattggttttcagcaaatgattcttcggaaaataattcctttaagtgcataaataaatcattcatttgtttatggtttaaaccgggatattcccttaaagttctctttaataattgtccgttcttttcttctaatgcttgaactacaataacaaatctttcatcttgctttagtacatcatcaaataaatttgtttgtccaatcattgaatttcacccctgaaaagttattgttatctatattatacacgatatgcaaaatatctaaaataaagaatggtaacatggtaataataaaatataaacagaatactagttaatacactttatactagaaaaagatattaaagtatatctgctttacaccattaaaaagcggcaaatgctatagataatctaaagcatctgccgtatgagaatttatttatttttgattgtcataatcgtgtggttttaaattaattgtttctagctttacaaattttgttttgtgaatgattttatgaataaagtaaatcaacgctagaatgattaaaggtaaaaagtttttaaaagcatttaaccattgatcttttaaaatatattcaactgagccaccaaatagcaagaataatagtgtagtgatgacaatgattggtcctaatggataaaaaggtgctttatatggtaggaccttattagggtcttgaccttgttttttaatagcttgtcgcaatcgtatttgtgaccaaatgcttgatccccaaacaactataatcattgaaccaataatttcaagtaaattaaaaacggcatttgaattaaagtttgcataaataataacaataacaacgactgcataagtagttaataatgctcttaaaggtaacttagttgtcttgtttaatttacttaaaaattggggtgcttttttgtctgaacttaaggaatacaacattctgcctgttgtataaacacctgaatttgcagcggataataatgaagttaaaataaccgcgttgattactgatgctgcaaaggctatgcctactctatcgaatacaattgtaaatgggctttgacttattgaactacttgctcttaataatgatggatctgtgtacggaataattgcaccaattactgcaattgataagacatagaataaaagaatacgccaaaatacttgtttaattgccttaggcatagactttttagggtcatctgattcaccagcagttactgctactacttctgtaccaccaaccgaaaatccggcgactaataatacgcctaagaaaccagagataccaccaacaaacggtgcttggccttttgtatagttttcaaatccatatgtatgaccacctaagataccgaaaatcattaaaaagccaaaaataacgaatacgataattgttaacactttaatcaatgataaccaaaactcagtttctccaaatgattttacagaaaaaatgtttaataatagtaaaattgtaataaagattaagctccaagtaatggggtggaaaaatttaaatgtgtcccagaaataaagcacatttgacgctactatgacatcaacacttgtaactaatgaccacaatgcccaatacaaccatcccatggtaaagccaagagatgagtcaataaagcgtgttgaataagagctgaatgaacctgatactggataaaatgttgccaactctccaattgatgacattaagaaatatagcatgacaccaataacaagataagcgagtatagcgcctccaggaccagcttgagaaatgatattaccagtagctacaaatagaccagtcccaattgcaccacctatagcaatcatggaaatgtgtcttgagttaagactacggttcattttattatcttccatatttagtctcccatctatttaaatatacccattattgtaagctttttaagtgtactattcaataactatttagtactgtaaagcgaaaaaattaaaattttctgattttttaatcatcttgagcatgtttaattgtaattttgatggggttaaattataatatgtattaaattataattattataaattgtggagggatgactatgtcacaacaagacaaaaagttaactggtgtttttgggcatccagtatcagaccgagaaaatagtatgacagcagggcctaggggacctcttttaatgcaagatatttactttttagagcaaatgtctcaatttgatagagaagtaataccagaacgtcgaatgcatgccaaaggttctggtgcatttgggacatttactgtaactaaagatataacaaaatatacgaatgctaaaatattctctgaaataggtaagcaaaccgaaatgtttgcccgtttctctactgtagcaggagaacgtggtgctgctgatgcggagcgtgacattcgaggatttgcgttaaagttctacactgaagaagggaactgggatttagtagggaataacacaccagtattcttctttagagatccaaagttatttgttagtttaaatcgtgcggtgaaacgagatcctagaacaaatatgagagatgcacaaaataactgggatttctggacgggtcttccagaagcattgcaccaagtaacgatcttaatgtcagatagagggattcctaaagatttacgtcatatgcatgggttcggttctcacacatactctatgtataatgattctggtgaacgtgtttgggttaaattccattttagaacgcaacaaggtattgaaaacttaactgatgaagaagctgctgaaattatagctacagatcgtgattcatctcaacgcgatttattcgaagccattgaaaaaggtgattatccaaaatggacaatgtatattcaagtaatgactgaggaacaagctaaaaaccataaagataatccatttgatttaacaaaagtatggtatcacgatgagtatcctctaattgaagttggagagtttgaattaaatagaaatccagataattactttatggatgttgaacaagctgcgtttgcaccaactaatattattccaggattagatttttctccagacaaaatgctgcaagggcgtttattctcatatggcgatgcgcaaagatatcgattaggagttaatcattggcagattcctgtaaaccaacctaaaggtgttggtattgaaaatatttgtccttttagtagagatggtcaaatgcgcgtagttgacaataaccaaggtggaggaacacattattatccaaataaccatggtaaatttgattctcaacctgaatataaaaagccaccattcccaactgatggatacggctatgaatataatcaacgtcaagatgatgataattattttgaacaaccaggtaaattgtttagattacaatcagaggacgctaaagaaagaatttttacaaatacagcaaatgcaatggaaggcgtaacggatgatgttaaacgacgtcatattcgtcattgttacaaagctgacccagaatatggtaaaggtgttgcaaaagcattaggtattgatataaattctattgatcttgaaactgaaaatgatgaaacatacgaaaactttgaaaaataaatttgatatgtagtttctatattgcgtagttgagcagtttatgatatcataataaatcgtaaagattcctaacaagagagggtgtttaacgtgcgcgtaaacgtaacattagcatgcacagaatgtggcgatcgtaactatatcactactaaaaataaacgtaataatcctgagcgtattgaaatgaaaaaatattgcccaagattaaacaaatatacgttacatcgtgaaactaagtaattcttatcattcaaatacgacgatttgaaaataaagcgggcttacctattatattggggagctcgcttttttatgaaatttttgtgaagagtgattaatggattgagtttcatcggtagaacaatatatgattatattagttgttactttattaaaatttgagaatatttatagaaggaaatagattactgattttataaagtcactttgttagcgaatgcttgaaagagtatttaatatagtagaatttaaaatttcaaagcggaatttaataagtacgaagtaattctgggtatgttttataaatgttcgataatacactttaatcttaaatatgatggtttagaaaatgatttaacaaagaaatgaaactttactgttgaattatgtgaggattgtgttattatataaatcgtaataattacgatttgataaaaagtgaggtaactatatatggctaagaaatctaaaatagcaaaagagagaaaaagagaagagttagtaaataaatattacgaattacgtaaagagttaaaagcaaaaggtgattacgaagcgttaagaaaattaccaagagattcatcacctacacgtttaactagaagatgtaaagtaactggaagacctagaggtgtattacgtaaatttgaaatgtctcgtattgcgtttagagaacatgcgcacaaaggacaaattccaggtgttaaaaaatcaagttggtaaaatcaaatttcgtactttagcccatttacaatatcaataaaacaatgtacagtatatacgaatgctataaactgaatgttttctcatattaataaggaaacattcggtttttaatttgcatttaaaaataattagtttttaaaggggctatttaaagtgaaaatatttgattacgaagatattcaattaatacctaataaatgcatagttgaaagtaggtctgaatgtgatacaactatccaatttggtccgaaaaaattcaagctacctgtagttcctgcaaatatgcaaacagttatgaatgagaaattagcgaaatggtttgctgaaaatgattacttttatatcatgcatcgttttgatgaagaagcaagaataccttttataaaacatatgcaaaattcaggcttatttgcatctatttcagttggtgtaaagaaagcggaatttgattttattgaaaagttagctcaagaaaaattaatccccgaatatattacaatagatattgcgcatggtcactcagattcagtgataaacatgattaaacatataaaaacccatatacctgatagttttgttattgctggtaatgttggtacgccagaaggtgttagagaattagaaaatgctggtgctgatgctaccaaagtcggtataggtcctggtagagtttgtattacaaagattaaaacaggttttggtactggtggttggcagttagcggcattaaacatatgtagtaaagcagctcgtaaacctttgattgccgatggtggtataagaacgcatggcgacattgctaaatcaattagatttggtgcatcaatggtcatgattggttcattatttgcggcacacgaagaatcacctggtgaaactgtagaacttgatggtaaacagtataaagaatattttggtagtgcatctgaatttcaaaaaggcgaacataaaaatgtagaaggtaaaaaaatgtttgtagaacataagggttcattaatggataccttaaaagaaatgcaacaagatttacaaagctcaatttcatatgccggtggaaaagacttgaaatcattacgtactgtagattatgttattgttagaaactctattttcaacggtgatagagattaatatttatagtaggtgatgtaaattaaaaaattcatagtaactgttgttgcgtttttatcaattattatcattgcgccaataacagaatttaaaccattcattcatttacaaaatgaagtaagacaatatattgacattcacatcaataaagaaacaatttctgcggaaaataaattggatacaccgaagaaacaacaatttgcctttaataatatacaaatgaacatgtcgaaatcagatgttgagaaaacattaaataaaccaaaaagagtgacatttaatgaatatggtacgaagtggtatacgtattatgatgacgattacaataattttataatgataagttacatgaaagataaagttaatgcgttatatacaaatcaaaatataatcacttcaaaatcaaaaattaaatacaatacacctaaatcggttgtaaggcaaagattaggcgaaccagaaacagagattgttaaaggtagagtgcgttacgaacaaaataataaagaatatgatgttttccataaaaatcacatttatacgacggtattttatgataagcatcgacgtaataatgtaacagctgttttacaagtaagtgatgctatggaaaatagattaaaagaacaatatggagcaccatcgaaatcgcttgcagatagttttgaactacaaaattttgatttagttaatgctgaaagaaaacaacatcaattatctacattgaagtattctaaacagaattctgaaactgcacgtaagcatagtaaagatatggccaacaatcattattttgatcatacaaatttaaaaggtcaatcaccatttgatcgattgaaaaaagatggtattacatttaactcagccggagagaatttagcatatggtcaagttagtagtatctatgcacatcaaggattaatgaattctattggtcacagaaaaaatattttaaatgatacgtttaaaatattaggtgttggtgttgattttaatgatgaaaaacaacctttttggacagaaaattatactggttaatgtttttggcatgagattaaagggtaatgtttgtctgtaaggaagtagataaacatgatgacaacagataaaccaaaagatgcggatatacttgaacgcgtcaaagatatacttaataaaaaagaaagaaaaaaataataatggctcgctcctgtaaattattacggggggcgagttttaatttgtgtaacattttgcagaaatctgtaattcaaaatttatattaaagaatgagattatctaacaattcgcaatttctgtttgaactgaatttagattagaataaataaaacctcttgaaaacgtaactttttcaagaggtccaaaatttataaaaatgagggcttaacaattacgataatatataacggtttaaaatattacatttcgcggtacaaaccaattactttcccaattacagcaacattgtctaggtaaattggctccattgtactattttcaggttgtaatcgataacgatttttttctttatagaagcgtttgacagttgcttcatcttcctcagtcatagcaacaataatgtctccattttctgctatggtttgactgcgaacaattactttgtctccgtctaatataccagcctcaatcatactgtcgcctacgacgtttaatatgaatatgtcgctattgtgtgtcgatgttaagtgttcaggtaatggaaaatattcttcaatattttctactgcggtaataggaacacctgctgtgactttaccaataactggcacatgaatcgtttcttccatattaatattatcatttgtttgatcacttacaatttctatagcacgtggtttcgttggatctcttcttatatagcctttttcttcaagacgtgaaaggtgaccatgaacagttgaactggatgctaagccaactgcttcaccaatttcgcgaacactaggcggataacctttcgtttgaacaacttgtttaatatagttatatatttcgctttgtcgttttgttaattctctcatatataggcactccctaaattaatttaaatacagtatatcattaatttgaaaccaaaacaaacatttgttcgttaaaatattgacacagaacataagttctgataaattactaatacaaacaaatgttctaggagtgaaaatgatgttttacaataaatataaaaacgtatcaacatatatcatcatatttttagtttcaagtgcagcctttgcaatattcttgttaagtgcgaacattagtgctcactcggaacaagtgtacgaaatgactgaccatcaaattaagaacaatacgataaataaagcatacgaacataaagaccctacaaacaatagcgaacaaagagatgggaaagtgttcgctttaataaattgatacattgtcacaacgttattttgcctatttttgcgaaatagcgttttttattacttttttgctgatcttaaatttgttatattttgttaaagtattataatgattgaataaacaaattgaaggtaggttttttaattgagtaattctgatttgaatatcgaaagaattaacgagttagctaaaaagaaaaaagaagtaggattaactcaagaagaagcaaaggagcaaacagccttaagaaaagcttatcttgagagttttagaaaagggtttaaacaacaaattgaaaatactaaagtaattgatccagaaggtaatgatgtaacacctgaaaaaattaaagagatacaacaaaaaagagataataaaaattaaatcacaaatctgtaaagaattttctgacattataacttgaaataagtattttacttatctttttattttaaaataagttataatgtatttgataaaattgaagaagggaagatacacaagatgtttaatgaaaaagatcaattagctgttgatacgctacgtgcactaagtatcgacacaatcgaaaaagcgaattctggtcatccaggattacctatgggagctgccccaatggcttacactttgtggacacgtcatctgaattttaatccacaatctaaagattacttcaatagagaccgtttcgtattatctgcagggcatggttcagcattattgtatagcttgttacatgtttctggtagtttagaattagaagaattaaagcaatttagacaatggggttctaaaacaccaggtcatcctgaatacagacatacagatggtgtagaagttactaccggaccacttggacaaggttttgctatgtcagtaggattagctttagcagaagatcacctagcagggaaatttaataaagaaggatataatgttgtagatcattacacatatgtattagcttctgacggtgatttaatggaaggtatatcgcatgaagcagcttcatttgctggacataataaattaagtaaattagttgttttatacgattcaaatgatatttcattagatggcgaattaaacaaagctttttctgaaaacacaaaagctcgttttgaagcatatggttggaattacttactagttaaagatggtaatgatttagaagaaattgataaagcgattactacagctaaatctcaagaaggaccaacgattattgaagttaaaacaacaatcggatttggttcaccgaataaagcaggaactaatggtgttcatggggcacctttaggtgaagttgaaagaaaattaacattcgaaaattacggtttagatcctgaaaaacgttttaatgtttcagaagaggtatacgaaattttccaaaatactatgttaaaacgtgctaatgaagatgaatctcaatggaattcattattagaaaaatatgcagaaacatatcctgaattagcagaagaatttaaattagcgattagtggtaaattgcctaaaaattataaggatgaattaccacgttttgaactgggtcataatggtgcatctcgtgatgattctggtactgttattcaagcaatcagtaaaactgtcccttcattctttggtggatcagcagaccttgctggttcaaacaaatccaatgtaaatgatgcaactgattatagttctgaaacacctgaaggtaaaaatgtgtggtttggtgtacgtgaatttgctatgggtgctgctgtaaatggtatggctgcacatggaggtttacatccatatggtgcaacattcttcgtatttagtgattatttaaaaccagcgttacgtttatcatcaattatgggattaaatgcaacgttcatcttcacacatgattcaattgcagtaggtgaagatggtcctactcatgaaccaattgagcaattagctggattaagagccattccaaatatgaatgttatccgtcctgctgatggtaatgaaacaagagtagcatgggaagttgccttagaatctgaatctacacctacttcattagtattgacacgtcaaaacttaccggtattagatgtaccagaagatgtagttgaagaaggcgttcgaaaaggtgcctatacagtttatggctctgaagagacaccagaattcctattattagcttcaggttcagaagttagtcttgcagttgaagctgctaaagatcttgaaaaacaaggtaaatcagtacgtgttgtttcaatgcctaactggaatgcatttgaacaacaatctgaagaatataaagaatcagttattccatcaagcgtaacaaaacgtgttgcgattgaaatggcttcaccgcttggatggcataaatatgtaggtactgcaggtaaagttattgctattgacggctttggcgcaagtgcacctggcgatttagtagttgaaaaatatggatttacaaaagaaaatatcttaaaccaagttatgagcttataagaataatttataaagcgagtatgtttagaagtctaggatgcataatcttaggcttcttttaaagtgttgaaatttagagtatagcacttaaactacatcataagtgataagttatgaaagtatactatttcagattaatctttaaaagctctgttataacagcatgatttttgatattatttttagtatcgatattaaaatacttgaataaactagttcttgaaataatgtgatgaatttagtaaaattcagtaggataaagaaagcgggtgaaacaatggcaacttggttagcaattatttttatagtagctgcattaattttaggtttaattggaggtttccttttagctagaaaatatatgatggactacttgaagaaaaacccaccaatcaacgaagaaatgcttcgtatgatgatgatgcaaatgggtcaaaaaccttctcagaagaaaattaatcaaatgatgacgatgatgaataaaaatatggatcaaaatatgaagagtgcgaaaaagtaaattcgcaattgatagaggctattttccagatatggaaatggcctctttttataatcaaattaataagaataaatatgtttattaaaattaaagttaacaaaatgacgaatagactgagaaatgctataattcattttgtatgatttacagagagtttatttaacgagaaggtgtctgcgtgctctatttaatattttcaatcattgtagctttatttatgggaactatagttatagttattcgtatgaaagctcaaaattatccggtaaatgagaaaaaaatagttttgccaccgttttttatggcgaccggtgcattgatgtacgtcgttccatattttaggctaacaggatcggaaatgctagaagcctttataattggtttgcttttttctacagttctaatttggacttctcgatttgaagtcaaaggtacagaaatttatatgaaacgatctaaagcatttccagttattttgatttcattacttatcattcgtactgtgatgaaaatattcattagtaatgaaatagatcctggagaattaggcggcatgttctttttattagcattctgtatgattgttccttggagagcagcaatgctatataaatacaaaaaactaaagaaaacattaatcaattaattacttttaaaaccacttgtgatcgacttctaaatcagtcaatgagtggttttaattttacttgaaaaggtgaaatgattatattaaaataaaagcgaacaaatgttctatatggaggcagtaatgaaaattatacatacagcagactggcacttagggaaaatattaaatggcaaacagcttttagaagatcaagcgtatattttagatatgttcgtagaaaaaatgaaagaagaagaacctgatatcattgtgatagctggagatttatatgacacaacatatccaagtaaagatgcaatcatgttattagaacaagcgattggaaagttaaatttagaactgcgtataccaataattattattagtggaaatcacgatggtaaagagaggttaaactatggggcgagttggtttgaacataatcagttatttataagaacagattttacatcgattaattcaccaatagagataaatggggttaatttttatacactcccttatgctactgtgagcgaaatgaaacactactttgaagatgacaccattgaaacacatcaacagggaattacgcgctgtattgaaacaatagcaccggaaattgatgaagatgccgtcaatattttaattagtcatctgactgttcaaggtggaaagacatctgattctgaaagaccattaactattggaacggttgaatcagttcagaaaggtgtttttgatatatttgattatgtcatgctaggtcacttgcatcatccatttagtatagaagacgacaaaattaaatatagtggctccttattgcagtattcattttcggaagcgggtcaagctaaagggtatagacgtgtaacaattaatgatggcattattaacgatgtatttattcctcttaagccacttagacaattggaaattatctcaggcgaatataatgatgttattaatgaaaaagttcatgtgaaaaataaagataattatttacattttaaacttaaaaatatgtctcatattactgatccaatgatgagtttaaaacaaatttatcctaatactttagcgctgacgaatgaaacttttaattacaatgaagaaaataatgctatagaaataagtgaaaaagatgacatgtcaattatcgaaatgttttataaacatataactgataaagaattatcggatatccaatctaaaaagataaaaaatattttagaaaacgaattgagaaaggaggattaatgaatgaaaccattacatttaaagttgaataatttcggcccctttttaaaagaagaaattgatttttctaaaattgataataatgaattgtttttaataagtggtaagactggatcgggtaaaacaatgatttttgatgcaatgacttatgccttgtttggtaaagcatcaactgaacaaagagaagaaaatgatttgagaagtcatttcgctgatggtaaacagccgatgtcagtaacatttgaatttcaattaaatcatcgaatttataaagtgcatagacaaggcccttatatcaaagaaggtaatacaacaaaaacgaacgctaaatttgatgtatttgagatggtggatggcaagtatgaaattagagaaagtaaagtaatttcaggtacccaattcattattgaattattaggagtaaatgcagatcaattccgacaattgtttattttgcctcaaggtgaattcaaacgctttttaatatcaaacagtcgtgaaaagcaagggatattaagaacactgtttgacagtgaaaaatttgaagctatacgagaaatattaaaagaagaagtaaaaaaagaaaaagctcaaatcgagaatagatatcaacaaattgaccttttatggcaagaaattgaatcatttgatgatgacaatataaaaggcttattagaggttgccactcaacagatagacaaattgattgaaaatataccacttttacaagctaggtcgaaagaaatactagcatctgtaaatgaaagtaaagaaactgctattaaagaatttgaaataatagaaaagaaaacattagaaaataatatattaaaagataatattaatcaactcaacaaaaataaaattgatttcgttcaattgaaagaacaacaacctgaaatagagggaattgaagctaagttaaagttgttacaagatattacaaacctattgaattatattgaaaatagagaaaaaattgaaactaaaattgctaatagcaaaaaagatatttctaaaaccaataataaaatattgaatcttgattgtgataagcgaaacatagacaaagagaaaaaaatgttagaagaaaatggagatttaattgaaagtaaaatctcttttattgataaaactagagtattatttaacgatattaataagtatcaacaaagttatctcaatattgaacgcttgagaactgagggtgaacaattaggtgatgaattaaatgatctaattaaaggtttagaaacggtcgaagattcaataggtaataaccaaagtgattacgagaaaattatcgaactaaataatacgataacgaacataaataatgaaattaatataattaaagaaaatgaaaaagctaaagctgaattagataaactattaggtagtaagcaagagttagagaatcaaattaatgaagaaacatctatattgaagaatctcgaaataaaattagatcgctacgataaaacaaaattggacttaaatgataaagaaagctttataagtgaaattaaatctgctgtaaatattggagatcaatgtccgatatgtggtaatgaaattcaggatttagggcatcatattgattttgacagtattgctaaacgtcaaaatgaaattaaagaaattgaagcaaatatccacgctataaaatcgaatattgctgtgcataattctgaaattaaatttgttaatgaaaaaatatcgaatattaatattaaaacgcaaagtgatttttcacttgaagtattgaataagcgtctgctagaaaatgaaaatgcattgaataatcaaagagatcttaataaatttatagaacaaatgaaagaagaaaaagataatctaacgttgcaaattcataataaacaattgcgtctaaataaaaatgaatctgagttgaaattatgtcgagatctcatcactgaatttgaaacactctcgaaatataataatatcactaattttgaggtggattataagaagtatgttcaagatgtgaatcagcatcaagaactctcaaaggagattgaagataagttaatgcaattgtctcaaagaaagttaattgagcaaaataatctaaatcattatgaaaatcaactagaaacttacaataatgacttagaattgaatgaacagtctattgaaatggaaatgtcgaggctgaatttaactgatgacaatgatatagatgaaataatagcctggaggggcgagcaagaggaattagagcagaaaagggatacttataaaaaacgttatcatgaatttgaaatggaaatagctaggttagaatcattaactaaggataaagagttattggactctgataaattaaaagatgaatatgagctaaaaaaaggaaagatgaatacactgatagatgaatactctgctgttcattatcaatgtcaaaataatattaataaaacacaatctatagtttcgcatattaattacttaaatcaagaattaaaggatcaacaagaaatatttcaattggctgaaattgtcagtggtaagaataacaaaaatcttacattggaaaactttgtcttaatttactatttagatcaaattattgctcaagcaaatctgagattagcaacaatgtcagataatcgataccaactaattaggcgagaagcggtttctcatggtcttagtggcctagaaattgatgtatttgatttgcattcaaataagtctagacatattagctcgttatcaggtggagaaactttccaatcgtcgcttgcattagctttagggttaagcgaaattgtacagcagcaatcaggaggtatttcactagaatcaatatttattgatgaaggattcggtacattagatcaagaaacgcttgaaacagcgttagacactttattaaatcttaaatcaactggtagaatggttgggattatttcacatgtgagcgaattgaaaaatagaatacctttagttttagaagtgaaatcagatcaatatcagagttcaacaagattcaaaagaaattaaaacataaaaaatagagatggtactttggaatgtatagaacaaccttagcccatctctttttatttaaaaattattttttctcacgtaataaatctctgatttcagttaataacacaacattttcttccacaactgcttcttcttcggcttcttctttcttcattaatgtatttgcaatcttaacaaagatgaataaagcaaacgcgatgataataaagtcgataacagattggataaataaaccgtatttaataccccagaatgaccattctttagcaaaatcaactgatccgaaaattttaccaattaatggcataatgatattttctactaatgaagatataatcttgttgaaagctgcacccatcacaacagcaattgctaaatctaagacgttaccttttaaggcgaactctttgaattcttttaacattacactcaacctctcttttttaaatgtaacctcaattatacaacaaataaaaaaattagaaaatagattattcaagaaaatttgattatcgcaaagacctttgttatcctataaaggtgcgtgagttattgaataaaatgtttagataatatttttattctactacataaaattaaatatagaattgaagggagtaattaattatgaattcttcttcaccagagaatccaaatggaaagaagtattcaccagtcttcatctatagtgcaattgttgttgctatagtcgtattacttggtgcatttttacctgaacaattcaactatgttaccaataatattaaaatgtggattacagaaaagttaggttggtattatcttattcttactacgattatcgtgttcttctgtatattccttatttttagtcctattggaaaacttaaactaggtaaaccaaatgacaaacctgagtttaatacaatttcatggtttgctatgttgtttagtgctggtatggggataggtttggtgttttatggtgcagctgaaccgatggcgcactttgctacgccacctacagcagatcccaaaactactgaagcttatactgaagctctacgttcaacatttttccattggggattccatgcttgggctgtttatggtgttgttgcgttagcgttggcatattcgcaattccgtaaaggtgaaccaggtttattatctagaactttacgtcctcttttaggtgataaagtagaaggtcctattgggatttttattgacgttttatctgtatttgcgacaatcgttggggtagccgtttcgttaggtatgggtgctctacaaattaatggtggtttacattacttgttcaatgttccaaacaatacgtttgtacaagcgattatcatcattgttgttactatcttatttatagcaagtgcatggtctggattaagtaaaggtattcaatacttaagtaacttgaacattggtttaggtactattttaatggtagctgctttaattgttggaccaactgttcttattttaaatatgttaactagctctacgggtagtttactaaacacattcttgtttaatagttttgatacagcagctttaaatcctcaaaaacgtgaatggatgtcttcatggacactttattactggggttggtggttaagttggagtccattcgttggagtgtttattgcacgagtttcaaaaggacgttcaattagagagttcatttctggtgtcttgctagttccagcaattgttagttttgtttggtttagtgtctttggtgtattaggcatcgagacaggtaagaaacacaaagaaatttttgatatgactcctgaaacacagctatttggagtgtttaatcatgtgccatttggcattgttttatcgttgattgcattattattaattgcatcattctttattacatctgctgactcagcaacatttgtattaggaatgcaaacaacatttggttcattaaatccatctagtatggtaaaagttgtttggggaatttcacaggccttaatagcatttgtacttttattagctggtggcggtaacggcgctgaagctttaaatgcgattcaaagtgctgcaattataagtgcattcccattctcctttgtcgtcatactcatgatggtaagtttctacaaggatgcgaaccaggaacgtaaattcctaggtttaacattgactccgaataaacatcgcttacaagaatatatcaagagtcaacaagaagattatgaatctgacattcttgaaaagcgtcagtcacgtagaaatatagagaaaaaagataactaataaagtttagttaagtattttaataacaagtagtatgtcattctagtagctagaacagatatactacttgtttgtttttgtggaaaattgagtatattcaaaaggataagaacgagaatttcgttattaaactacgaattctcgatttttttatattttaagataggtttatttctgaaaacttaatagaaaggggtttgacaaagctaaagtgaagtttgacggtataaacgcaaattaaatatacttttatagaaaattaactcaggctgggacataaatcaatattctatgctctacgaagttatattggcagtagttgactgaacgaaaatgcgcttgtaacaagcttttttcaattctagtcaggggccccaacacagagaatttcgaaaagaaattctacaggcaatgcgagttggggtgagggccccaacacagaagctgacgaaaagtcagcttacaataatgtgcaagttggggatgggccccaacaaagagaaattggattcccaatttctacagacaatgcaagttggggtgggacgacgaaataaattttgcgaaaatatcatttctgtcccactcccatcaaaagaatgacattgaaaaaaatattaaagtttggtgccataattttctttctgctcaatgaaataatacgtttaaaaattgaattgaatcattcgcgaaattgataattattctcaattaataaaaaatacttattacaccttacctgtatgataagttttgcttatatactctgattaaaaagtcaaaacctaaattaagcgttttctaagcatgatgagttgtttatcaataaatataataatacaatttaatcaaggcatataaatataaaaatgtatcaagggggatcattaaatggctgcaaattttaaagagcaatcaaaaaaacattttgacttgaatggccaaagttatacttactatgatttaaaagctgtagaagagcaaggtattactaaagtttccaatttaccttattcaattcgtgttttgttagaatctttacttcgtcaagaagatgattttgtaattacagacgatcatattaaagctttaagtcagtttggaaaagatggaaatgaaggcgaggtgccatttaaaccttctcgtgttattttacaagatttcacaggtgtaccagccgtagttgatttagcttctttacgtaaagcaatggatgacgttgggggagatattactaaaattaatccagaagtaccggtggatttagttattgaccactcagttcaagtggatagctatgcaaatccagaagctcttgaacgtaatatgaaattagaatttgaacgtaactatgaacgttatcagtttttaaattgggcaacgaaagcatttgataattacaatgcagttcctcctgcaactggaatagttcaccaagttaacttagaatatttagcaagtgttgtacatgttcgtgatgtagatggtgaaaaaactgcatttccagatacattagttggtactgattcacatacaacaatgataaatggtattggcgtactaggatggggtgttggtggtattgaagctgaagctggaatgcttggacaaccttcttatttcccaattccagaggttattggtgtacgactagtaaattcattaccacaaggcgcaacagcaactgatttagcgttaagagtaactcaagagctacgtaaaaaaggtgttgttggtaaatttgtggagttctttggtccaggtgtacaacatttaccactagcagaccgtgctacaattgcaaacatggcaccagagtatggagcaacttgcggattcttcccagttgatgatgaatctcttaaatatatgaagttaactggtagatcagacgaacatatcgcgctagtaaaagaatatttgaaacaaaaccatatgttctttgatgttgagaaagaagatcctaattatacagatgttatcgaattggatttatcaacagttgaagcatcgctttcaggaccaaaacgtcctcaagatttaattttcttaagtgatatgaaatcatcatttgaaaattctgtaacagctccagcaggcaaccaaggacacggtttagataaaagtgaatttgataagaaagctgaaattaactttaaagatggatcaaaagctacaatgaaaacaggtgatattgcaatagcagcaattacatcatgtacaaatacatctaacccttatgtaatgttaggtgcaggtttagttgctaaaaaagcagttgaaaaaggcttgaaagttcctgaatacgttaaaacttctctagcaccaggatcaaaagttgttaccggatatttaagagatgctggcttacaaccttatttagatgatttaggcttcaacttggttggttatggatgtacaacttgtatcggtaattcaggtcctttattaccagaaattgaaaaagcgattgctgatgaggacctattagtgacatctgtattatctggtaaccgtaactttgaaggtcgtatccatcctcttgttaaagccaattacctagcttcaccacagttagttgttgcttatgcattagctggaacggttgatattgatttacaaaatgaacctattggtaaaggtaatgacggtgaagatgtatatttgaaagatatttggccatcaattaaagaagtttcagataccgttgatagtgttgtaacacctgaattatttattgaagaatataataacgtatacaataacaacgaattatggaatgagattgatgtaactgatcaacctctatatgactttgatcctaattcaacatacattcaaaatccatcattcttccaaggattatctaaagaaccgggtacgattgttccattaaatggtttacgtgttatgggtaaattcggtgattctgtgacaactgaccacatctctccagcaggtgcaattggtaaagatacgccagctggtaaatatttacaagatcatcaagtgcctattcgtgaatttaattcatatggttcaagacgtggtaatcacgaagtaatggttcgaggtacgtttgctaatatacgtattaaaaaccaattagcgccaggtactgaaggtggttttacaacttattggccaacaaatgaagtaatgcctatctttgatgctgcaatgaaatataaagaagatggtacaggtttagttgtattagctggtaacgattatggtatgggttcatctcgtgactgggcagcaaaaggtacaaacttattaggtgttaaaacagttattgcacaaagttatgaacgtatccatcgttcaaatttagttatgatgggtgtattaccattagagtttaaaaaaggtgaatcagctgattctcttggtctagatggtacagaagaaatttctgttaatattgatgaaaatgttcaaccacatgactacgtcaaagttactgctaagaagcaagatggtgatttggtagaatttgacgctatggttcgttttgactcacttgttgaaatggattactatcgtcacggtggaattttacaaatggttttaagaaataaattagcgcaataaaaaatagatatcacagtaaaattttaatcggtatttgaggcactttgatagtgctcaaaaatacttctataaactttatgatataataggtcggttcaaaacctttgtgttcttggccggcctcttcttgtattttatgttagaatgagatataaagttaaactgaaagaaggcttaaaatgatatatagtattacagaaatagaagcgcgttatgctgaaactgataagatgggtgtaatttatcacgggaattatgcaacttggtttgaagttgcgcggttggattatatatcgaagttaggttttagttatgctgatatggaaaaacaaggaatcatttcacctgtgactgacctcaatgtcaattataaaaagtctattttttatccagaaaaagttaaagttaaaacttgggttgaaaaatattcgagattacgttcagtgtataaatatgagatttttaatgaaaaaggtgaacttgcaactacaggttctacagaattgatttgcattaaagaagatacttttaagcctatacggttggatcgttatttcccagattggcatgaagcttatagtaaagtgcaaacgctcaataatgaagggaaaacagtagagataatggatggtattgattctttataagttactgtaaatgtttggagaggcaatattaacaattaatctataaaaaatagccaatacgttaacattaatgtaattagcgtgaagataagctaatatatagcaaaaacgaacttgttcatacaacatcagatgtgctaaaccaaagtacaacttccgaggttcaggacacatcagaatgtgtaaacaagttcgttttattttagttattttgtggaataagaaatttcatcttcgtgatcaactacatttacaataatgtggtcatcttcaaagtaccacaaatctttttccgctacgacaacatttaaatcgtcatattgttgttcatagccaatatcaacatcttcctttggttcaactgtaaaagcaggactaaatccttgcttgagttggaattcgccaccatatcttacaaaaaacacgagcactttattattttcaggcaactcaagttcatttttaaaccaagttactgctgcatcagtaagttctatttgcataacaatgacctcctatatttattacagaatgggagtgggccaacttgtattatttgtggaatttcttatcgaaattctctgtgttggagcccaccccaacctgctcattattgtaagctgaatttccataagcttctatgttgggacccccgaccagaattgaaaaaacctagttataagcgcattttgttcggttaactacagctaatataacattgtggagcctatgacattgatttatgtctcggtctcaaatgttcttgtaaaaaaactaagtatagttgaattttaagttaaaaaaattgtttttgcaaaaataaaataatccatcaactgcaaaaaaatatgcaatgatggactaatgtcaaaaaattgttacatccattttattttaggttcttcgcctctaaaaatccttgcgatattagagcgatgtctaattatcaatatgattgaaactaagaaactaacgactaataaaatatagtcttgaatgataagcgagccaatcacacagcaaattgctgcaacgatacttgctaaagaaacatatttaaaaatcttcaatacaataaagaagataattgcaagtattagtaaaagtatcggattgactcccaagacgacacctgcactagttgcaacagctttgccaccttggaattttaaataaacaggataaacgtgtccaagtatagcgaataagccaacaattaaaccatttgtaaaaaaagtactaatagggccatctgcgtgaacttgtaaccataaagggaagaaaacagttatgaaccctttgaaaatatctagaaatgttaccaagaatcctgcaggacgacctaatactctaaagctattagtagcgccagtattaccactaccaaattgtctaatatcttttttgaaaaataattttccaattacgaatccacttgggaaagcgccgataagataacttagtagtaacatgacgattatcatcataaatattacacatcctttaatatcttaggactattttatcatattcatttaaattacggctaaaaattttaaaaacggggattaatatatggaattaagctatgaaagttaattgatacttgcattttacgctgatttatataagaataactattgtatagttttaaaaacgaacgtacgtttgcaggaggcgaaatcattggcaatgaataaacaaaataattattcagatgattcaatacaggttttagaggggttagaagcagttcgtaaaagacctggtatgtatattggatcaactgataaacggggattacatcatctagtatatgaaattgtcgataactccgtcgatgaagtattgaatggttacggtaacgaaatagatgtaacaattaataaagatggtagtatttctatagaagataatggacgtggtatgccaacaggtatacataaatcaggtaaaccgacagtcgaagttatctttactgttttacatgcaggaggtaaatttggacaaggcggctataaaacttcaggtggtcttcacggtgttggtgcttcagttgtaaatgcattgagtgaatggcttgaagttgaaatccatcgagatggtaatatatatcatcaaagttttaaaaacggtggttcgccatcttctggtttagtgaaaaaaggtaaaactaagaaaacaggtaccaaagtaacatttaaacctgatgacacaatttttaaagcatctacatcatttaattttgatgttttaagtgaacgactacaagagtctgcgttcttattgaaaaatttaaaaataacgcttaatgatttacgcagtggtaaagagcgtcaagagcattaccattatgaagaaggaatcaaagagtttgttagttatgtcaatgaaggaaaagaagttttgcatgacgtggctacattttcaggtgaagcaaatggtatagaggtagacgtagctttccaatataatgatcaatattcagaaagtattttaagttttgtaaataatgtacgtactaaagatggtggtacacatgaagttggttttaaaacagcaatgacacgtgtatttaatgattatgcacgtcgtattaatgaacttaaaacaaaagataaaaacttagatggtaatgatattcgtgaaggtttaacagctgttgtgtctgttcgtattccagaagaattattgcaatttgaaggacaaacgaaatctaaattgggtacttctgaagctagaagtgctgttgattcagttgttgcagacaaattgccattctatttagaagaaaaaggacaattgtctaaatcacttgtgaaaaaagcgattaaagcacaacaagcaagggaagctgcacgtaaagctcgtgaagatgctcgttcaggtaagaaaaacaagcgtaaagacactttgctatctggtaaattaacacctgcacaaagtaaaaacactgaaaaaaatgaattgtatttagtcgaaggtgattctgcgggaggttcagcaaaacttggacgagaccgcaaattccaagcgatattaccattacgtggtaaggtaattaatacagagaaagcacgtctagaagatatttttaaaaatgaagaaattaatacaattatccacacaatcggggcaggcgttggtactgactttaaaattgaagatagtaattataatcgtgtaattattatgactgatgctgatactgatggtgcgcatattcaagtgctattgttaacattcttcttcaaatatatgaaaccgcttgttcaagcaggtcgtgtatttattgctttacctccactttataaattggaaaaaggtaaaggcaaaacaaagcgagttgaatacgcttggacagacgaagagcttaataaattgcaaaaagaacttggtaaaggcttcacgttacaacgttacaaaggtttgggtgaaatgaaccctgaacaattatgggaaacgacgatgaacccagaaacacgaactttaattcgtgtacaagttgaagatgaagtgcgttcatctaaacgtgtaacaacattaatgggtgacaaagtacaacctagacgtgaatggattgaaaagcatgttgagtttggtatgcaagaggaccaaagtattttagataattctgaagtacaagtgcttgaaaatgatcaatttgatgaggaggaaatctagtgagtgaaataattcaagatttatcacttgaagatgttttaggtgatcgctttggaagatatagtaaatatattattcaagagcgtgcattgccagatgttcgtgatggtttaaaaccagtacaacgtcgtattttatatgcaatgtattcaagtggtaatacacacgataaaaatttccgtaaaagtgcgaaaacagtcggtgatgttattggtcaatatcatccacatggagacttctcagtgtacgaagcaatggtccgtttaagtcaagactggaagttacgacatgtcttaatagaaatgcatggtaataatggtagtatcgataatgatccgccagcggcaatgcgttacactgaagctaagttaagcttactagctgaagagttattacgtgatattaataaagagacagtttctttcattccaaactatgatgatacgacactcgaaccaatggtattgccatcaagatttcctaacttactagtgaatggttctacaggtatatctgcaggttacgcgacagatataccaccacataatttagctgaagtgattcaagcaacacttaaatatattgataatccggatattacagtcaatcaattaatgaaatatattaaaggtcctgattttccaactggtggtattattcaaggtattgatggtattaaaaaagcttatgaatcaggtaaaggtagaattatagttcgttctaaagttgaagaagaaactttacgcaatggacgtaaacagttaattattactgaaattccatatgaagtgaacaaaagtagcttagtaaaacgtatcgatgaattacgtgctgacaaaaaagtcgatggtatcgttgaagtacgtgatgaaactgatagaactggtttacgaatagcaattgaattgaaaaaagatgtgaacagtgaatcaatcaaaaattatctttataaaaactctgatttacagatttcatataatttcaacatggtcgctattagtgatggtcgtccaaaattgatgggtattcgtcaaattatagatagttatttgaatcaccaaattgaggttgttgcaaatagaacgaagtttgaattagataatgcagaaaaacgtatgcatatcgttgaaggtttgattaaagcgttgtcaattttagataaagtaatcgaattgattcgtagctctaaaaacaagcgtgacgctaaagaaaaccttatcgaagtatacgagttcacagaagaacaggctgaagcaattgtaatgttacagttatatcgtttaacaaatactgacatagttgcgcttgaaggtgaacataaagaacttgaagcattaatcaaacaattacgtcatattcttgataaccatgatgcattattgaatgtcataaaagaagaattgaatgaaattaaaaagaaattcaaatctgaacgactgtctttaattgaagcagaaattgaagaaattaaaattgacaaagaagttatggtgcctagtgaagaagttattttaagtatgacacgtcatggatatattaaacgtacttctattcgtagctttaatgctagcggtgttgaagatattggtttaaaagatggtgacagtttacttaaacatcaagaagtaaatacgcaagataccgtactagtatttacaaataaaggtcgttatctatttataccggttcataaattagcagatattcgttggaaagaattgggacaacatgtatcacaaatagttcctatcgaagaagatgaagtggttattaatgtctttaatgaaaaggactttaatacagatgcattttatgtttttgcgactcaaaatggcatgattaagaaaagtacagtgcctctatttaaaacaacgcgttttaataaacctttaattgctactaaagttaaagaaaatgatgatttgattagtgttatgcgctttgaaaaagatcaattaattaccgtcattactaataaaggtatgtcattaacgtataatacaagtgaactatcagataccggattaagggcagctggtgttaaatcaataaatcttaaagctgaagatttcgttgttatgacagaaggtgtttctgaaaatgatactatattgatggccacacaacgcggctcgttaaaacgtattagttttaaaatcttacaagttgctaaaagagcacaacgtggaataactttattaaaagaattaaagaaaaatccacatcgtattgtagctgcacatgtagtgacaggtgaacatagtcaatatacattatattcaaaatcaaatgaagaacatggtttaattaatgatattcataaatctgaacaatatacaaatggctcattcattgtagatacagatgattttggtgaagtaatagacatgtatattagctaaaaactatatgcaatcacgaaattaaatgataaaatacagtaatgttaaattttgactaaattcaagggatttatattaaatgctgaccaagtacttatcgttaaattagcgatatactttgaccaaactaatataaatctcttgtattgtataagaaatgatgatgtatctctatatttactgaaggttcaattcggtctaattttatagaaggtacatgattcatgtagaggatgcgaggggtttattttgaaagatttcgatagtttaatacctggatggtttaaagaatttgtccatgttggtaccgatttaatatggtctcaatatttaattggtctattattgacagctggattcttctttacgattagttctaaattcgttcaattacgaatgttacctgaaatgtttagagctttagtagaacgtccagaaactttagaagatggtaagaagggtatttcgccattccaagcatttgcgattagtgctggttcgagagttggtactggtaatattgctggtgttgcgactgcgattgttttaggcggtccaggtgcagtattttggatgtgggttattgcatttataggtgcagcgagtgcatttatagaagcgactttggctcaggtttataaagtacatgataaagatggtggattccgtggtggtccagcttactatattactaaaggtttaaatcaaaaatggctaggtatcgtatttgcgattttaattacaattacatttgcatttgtatttaacacagtgcaatctaatacaattgcggagtcgttaaatacgcaatataatattagtccagtaatcacaggtattattttagcaatcgtaacagctattattatatttggtggtgtacgtagtattgctacgttatcttcgttaattgtaccgattatggctatcatttacattggtatggttttagtaatattgctatttaatttagatcaaattgttcctatgataggtacgattattaaaagtgcatttggtatcgaacaagtaactggtggcgctgtaggtgctgcggttcttcaaggtatcaaacgtggtttattctctaacgaagctggtatgggttctgcgccgaatgcagcggcaactgctgccgtaccacaccctgttaagcaaggtttaatccaatcattaggtgtgttctttgatacaatgttggtttgtacagcaactgcaatcatgattttactatattcaggactgaaatttggtgataacgcacctcaaggtgttgcagttactcaatcagcacttaatgagcatttaggttctgctggaggtattttcttaacaatagcagttacactgtttgcattttcatctgttgtaggtaattactattacggtcaatctaatattgaatttttatcaacaaaccgtgtaatattatttatctttagatgtcttgttgtagtacttgtctttgtcggtgcagttgtaaaaacagaaacagtatggaatacggcagacttatttatgggcttaatggcaattgtaaacattatttccattataggactgtccaatgtagcttttgcattgatgaaagattatcaaaagcagaaaaaagaaggcaagaaccctgtctttaaacctgaaaacttagaaattaacttatttggaattagtgcttggggcgctaacaaatataagaactctgataaataaatatttttaatgtaacgattcattatataaaaatcaaataaaccctgaggttttcaaattaaagcgaaaatctcagggttttaaatttgtactcaattatcatctgtatcattacactagttaatctaagatttgattatatattaatatagtaaggttgagatttatttcctccattggtgtgcaaagactataccattgataagacatattgttggatagatgaatataaatttgttttagctttgcacaatttaatagtacgttttagtttgtattgagtattaattcagataatatataaataaatagaattatttgtaaatatgggagtcagatttttttattatagttattccactttgagagacatcgaaattaaattaagatatatcatataggataggcgtgtaatagaacacaagtatttaaattattatactttcaagttagacatttccgatatataatcttaataatagaaaaataggtgatgataatgggagaatatattgttactaaaacattgaacaacaatgtcgtagtatgtactaataatgatcaagaagttattttaatcggtaaaggtattggttttaacaaaaaagagggaatggcgttaaacgaccaaactattacaatagagaaaatttataaattagaaagtgagcaacaaaaagcacattataaaagtttagttgaaatcgctgatgataatgtattacaagtaattattgattcgttgaattttatttctaatactgcgatgaatgttgattcaaaacaacttgtagtttcattaacggatcatattatatttgcttataaacgcttaaaacaaaatcaagttattagcaatccatttgttatggaaactatgcagttatatagtgatgcatatcatattgctaaacaggtgattgatcagttaaatgcagcattagatgtacattttcctgaagatgagataggatttattgcattacatattgcatctaatacagaagatttatctatgcatgagatgaccttgatcaataatgttattaaaaaaggtatagatatcattgaatcagaccttgtgacaactgttgataaggaatcattacaataccaacgttttataaggcacgtacaatttttaattcgccgattaagaagaaaagaatatatacatgcacaagatgattttgtgtctatgattaaaaatcactatccgatttgctataacacagcatataaaattttaactatgatacaaaaacaatttgatgttaatatcagtgagtctgaaattatatatttaacattacacattcatcattttgaagaaaggattaatcaatcctaaattaagtgtattacacgggcgtttcgttactgtaaagggtatttgtatggtatcattgatgttagtaattttacataagtggactgtttttatacaacatcttatgaatattttaagtggtggtgaatctataattgaatgaaaatgaaaagaatataagaaagaattttttaaaatttaccgaatcacggtatatgaagtttgttggtgggaatgatttagtcttctcattaatagcgctagtattgttgggtattgttatttttattttcgaaaaagtatcatatgtttttgatccttttatcatcgtttttaagacgatagcagcacctatcatcgtctctttaattctattctatctatttaacccaatcgtaaatatgatggaacgttatagaataccaagagttgcaggtatttctattatttatctagctgtagtaggtgttattacgttaattgttaatttattgatacctattattggttcgcaagtagatagtttagttaaaaattcaccgcaatatctagaaaaattaattaattctattgataaaatagcaaataatacgtttttctcttcgtattatagtcaaattaatgattggttaaattctttacctaagaaaataccatctatgttaagtgaatttacagatggctttgggtctaaaattgcaacgtttgcagaaacgattgctaatattggcgttgtgattgtcacaacaccatttgtactattctttatgcttaaagatggacatcacttcaaagaattttcaacgaatattatgccaccgaaattccgaaaagattttcatgatctacttgaaaaaatgagtgttcaagttggttcatacattcaaggacaaattatcgtttcattctgtatcggtatactgttgtttatcggttattcggttatcgggttgaaatatagcttagtattagctagtattgcggcagttacaagtgttgtaccatatttagggcctactatagcgatttctccagctattgtaatagctgctataacatcgccgtggatgctcttaaaattagcagtagtatggactttagtacaatttgttgaagggcacttcatttcaccaaatatcatgggtaaaacacttaagattcatccacttacaatcattttcattttactgtgtgcaggcaaattgcttggtattgtaggcgttattttaggtattccgggatatgctattttaaaagtattagttactcatttattccaattatttaaacgtcgatacaatcgtttctatggtaatgatgtaggtgaatatgatattaaagaaagtaataaaatagttgaataagtaataaaaaataccaatgactatatgtttgttggtattttttatggtgcttataatgttgggcagttacatttatgattatcagcacatgtttagcttataaatttttacgaaagtttagccgtttataaagcacatgcataatgaaacgagtatttgccacttgattagtacttcattattatgtcgaaaataaaaataagtggtatttttaatatattaagaagcactcataatcggctgttaattaataatatttttcataagtattgattcatcattttctttatgttaaatatgaatcagtatagataaccatattgttctgtttgagatagaaatattttctatttacttcttaatacagatatcaatatgacaaaagtgttatataaatcaaaggtaaatgatatgctatttttatggtttatatgatatattttgatttataacagaaataattagaattgatgtgaaaaaatgaatcaggaagttaaaaacaaaatattttcaatcttaaaaattacgtttgctacagctttatttatttttgtagcaatcacattgtatcgggagttatctggtattaactttaaagatacgttggttgaatttagtaagattaaccgtatgtccttagtgttactatttattggtggtggggcatcgcttgttattctatcaatgtatgatgtgattttatctagagctttaaaaatggatatatccttaggcaaagttttaagagtaagttatatcatcaatgcattgaatgcgattgtaggtttcggtggctttattggtgcaggcgttagagcaatggtttataaaaactatacgcatgataaaaagaaattagttcactttatatccttaatacttatttcaatgttgacaggtttaagcttattatcattgctaattgtattccatgttttcgatgcatctttaatcttagataagattacatgggtaagatgggtattatatgtagtgtcatttttcttaccattattcattatttattcaatggttagaccacccgataaaaacaatcgttttgtaggattgtactgcactttagtgtcgtgtgttgaatggttagcagctgcagttgtattatatttctgtggtgtaattgttgacgctcatgtatcattcatgtcctttattgcaatatttatcattgctgcattatcaggtttagtcagctttattcctggtggtttcggcgctttcgatttagttgtattactaggatttaaaactttaggtgtccctgaggaaaaagtattattaatgctacttctatatcgttttgcgtactattttgtaccggtaattattgcattaattttatcatcatttgaatttggtacatcagctaagaagtacattgagggatctaaatactttattcctgctaaagatgttacgtcatttttaatgtcttatcaaaaggatattattgctaaaattccatcattatcattagcaattttagtattctttacaagtatgatcttttttgtaaataacttaacgattgtttacgatgctttatatgatggaaatcacttaacgtattatattctattggcaattcatactagtgcttgtttattacttttactgaatgtagttggtatttataagcaaagtagacgtgccattatctttgctatgatttcaattttattaatcacagtggcgacattcttcacttacgcttcatatattttaataacatggttagctattatttttgttctgcttattgtagctttccgtagagcacgtaggttgaaacgcccagtaagaatgagaaatatagttgcaatgcttttattcagtttatttattttatatgttaaccatatatttattgctggaacgttatatgcattagatatttatacgattgaaatgcatacatctgtattgcgctattacttctggcttacgattttaatcatcgctatcatcataggtatgattgcatggttgtttgattatcaatttagcaaagtacgtatttcttctaaaattgaagattgcgaggagattattaatcagtacggcggtaattatttgagtcacttgatatatagtggtgacaagcagtttttcactaatgaaaataaaacagcatttttaatgtatcgttataaagcaagttcattagtggttcttggagatccgttaggtgatgaaaatgcctttgatgaattgttagaagcattctataattacgctgagtatttaggctatgatgttatattctatcaagttacagatcaacacatgcctttatatcataatttcggtaaccaatttttcaaattaggtgaagaagcaattattgatttaacgcaattttcaacttcaggtaaaaaacgccgtggatttagagcgactttaaataaattcgatgaacttaatatttcgttcgaaattattgaaccaccgttttcaactgaatttataaatgaacttcaacatgtaagtgatttatggctagataatcgtcaggaaatgcatttctctgttggtgaatttaatgaagaatacttatctaaagcgccaattggtgtaatgcgaaatgaagaaaatgaagtaattgcattttgtagtttaatgccaacatactttaatgatgccatttcagtcgatttaattagatggttgccagagttagatttaccattaatggatggtctatacttgcatatgttactttggagtaaagaacaaggttatacaaaatttaatatgggtatggcaacgttatcgaacgttggtcaattgcattattcatatttaagagaacgacttgcaggccgtgtctttgaacatttcaacggtctatatcgtttccaaggattacgtcgttataaatctaaatataatccgaattgggaaccacgctttttagtttatcgtaaagataattcgctttgggaatcactttctaaagtaatgcgtgtaatacgtcacaaataattaaaatccaagtgctaagaggtatacagttatgcctgatgcgcttggattttttggtttctataaagaatgatttataaaaaacggtacagataagaatatttaagtttcctatctgtaccgtattttaatattgaaatgagctaaagttaagtcgcctaacttttattatcagtccaatcagtttcatcaagtataaatgttattgcttatttttgtattcttggcgtattttttgttcttctgcatagcgctctggatttttcttataaaaatcttggtgatagtcttcggctttgtaaaattgtgacgctggtaatatttttgttgcaattgccttatcagcattaatcgtatttttaagctgctcgatataagtctcagcgagttctttttgatgatcattagtgtagaaaatagctgtttgatattgaggaccacggtcttgatattgaccacctgtatctaatgggtcaatgactgagaaaaatatttctaataacttattgtatgagaataatgcaacatcatattgaatttcaacagtttctaaatgaccactcgtacctgattttacttgttcgtaagtaggattttcaatatgtccgcccatatatccagaagttactttttctatgccgtcaaaggtgtcaaatggtttcgtcatacaccaaaagcaacctccggcaaaataagctgtattaatattcatttttgacatcctttcattagaccttagtacgatttattaagaaatcacttgctttttgaattgtttttatataacgttaatatgtgattattatagtacacaaaaatctatttttgaagatataaggtaggtaaatatggataaagaaactaatgacaacgaatatagacgtcaaagtgaacatcgcacttcggcgcctaagcgaaaaaagaagaagaaaattaggaaattacctatcattcttctgattgttgtaattttacttatcgcattagttgtatatattgtacatagttacaatagcggtgtagaatatgccaagaaacatgcgaaagatgttaaagtacatcaatttaatggaccagtaaaaaatgatggtaaaatttctattcttgtactcggtgcagataaagcacaaggtggacaatcaagaacagattctatcatggttgttcaatatgactttatcaataaaaagatgaaaatgatgtctgtcatgcgtgatatttatgcagatattccaggatatggaaaacacaaaattaattcagcatacgctttaggtggtccagagctacttagaaaaacacttgataaaaatttaggaattaatcctgaatattatgcagtagttgattttactggatttgagaaaatgattgatgaattaatgcctgaaggtgtaccaattaatgtcgaaaaagatatgtcgaaaaatattggtgtatctttgaaaaagggtaaccataggttgaatggtaaagaattacttggttatgcaagattccgtcacgaccctgaaggtgacttcggacgcgtgcgacgtcagcaacaagtgatgcaaacattgaaaaaagaaatggttaattttagaacagttgttaaattaccaaaagttgcaggtattttaagaggctatgtgaatacaaacattcctgattcagggattttccaaacaggtttgagttttggtatccgaggtgaaaaagatgttaagtcattgactgtgccaatcaagaactcatacgaagatgtcaatacaaatactgatggtagtgcattacagattaataaaaacacaaataaacaagctattaaagactttttagatgaagattaaaaataaacaaggcgatttctatcatactcagatagaagtcgccttgttcgttttcaaagaattaattggcatgcatcttatgaagaattattgatctgactttcttacgccagccacaccataatggtttggtttcatttcttctataacaacgtgaattgcttgtctatttgcccccgttgttttttctacggcgtcagttacttcgctaactaaattttttaattgttcatccgaacgaccttctaataattttacattgacgattggcatcatccaaacctcctaatcattattaatttgagtatatcatgtaatacttaaaaattcatttgcaaaataacagaacatttgttctaaaatagttgaaatagaacacgtgttcgtatataataagattcaagtaagggaggaataacagtgtataattatcatttattagaagatagggatgttctatgtattgaccaaaaaagtttttttgcgagtgtttcttgtattgaaaaggggctagatccattagaaacaaagctagctgttgttgcagatactaagcgtcagggttctgtaatattggctgcgacacctaaattaaaagaattaggcatcaagacagggtcgcgattgtttgaaataccacatagaaatgatatttacattatcaatccaagtatgcgtaaatatcttaatgtttcagttgctatttctaagattgcattgcgttatattccacctgaagatttacaccaatatagtattgacgaattttttatggatgttactgatagctatcatagatttagttctacagtacatgcattttgcgaaagacttaaacgtgaaatttatgaagaaacaggcatttattgtactgtgggcattggttctaatatgttattaagtaaaattgctatggatgttgaagcgaagcatagtcaaaatggtatagctgaatggcgatatcaagatgtaccaacgaaattatggccaattcagcccttgcgagatttttggggtattaatcgtcgaacagaagccaaattgaataaaagaggaatttttactataggagatttagcgaaatatccatataaatttttaaaaaaagagttcggtattttaggtgttgatatgcatctacatgcgaatgggatagatcagagtaaagtacgtgaaaagcacaagatcagcaatccatcgatatgcaaaagtcaaatattaatgagagattatcattttgatgaagcaaaagtagtaatgcaagagttaattgaagatgttgctagcagagttcgagcaagaaaaaaagtggcaagaacgatacattttgcctttggctatagtgatgaaggcggtgtacataagcaatatactttgaaagatccaacaaacttagaaaaagatatttataaagtagtaatgcatttcgcagataaattatgtaataaacaagcactatatcgtacgctaagtatatctttgagtcaatttattaatgaggatgagcgacagttaagtctgtttgaagatgaataccaacgcaaacgtgacgaatgtctagctaaaacgatagaccaattacatttgaaatacggcaaaggtattgtgtccaaagcagtatcgtttacagaagcaggtacaaaacacggcagattaggtttaatggctggacataaaatgtaatgactatacggtttaagtaatatataactgtgattcgtataaaataagtctctaaagataaatatttcatatatcacaatagattttcacaataatatctaagaatacatggaatttatcaaaagagacttaataattattggatataacaatcaaaatcactcaatgcttgcataccgcgttctcggtcagtagggtttttgaaactaatttttaaagcaccgtatatatcttcgcgtacttctaagattcttaagttgcttatagatatgttatgtaaactcaggatataagtcactttacttatcatacctgattcatccggaatgtctacatatagatcatacgcagtatttagtccacctagttgtttagcgggtagtgcgtcgcgatacgatttagcttgggcaaaaaatgataacaatttttcagaatcattgctttcaattagtctttctaaatcttgaaactgactttttagctgtcgaatcatttctaaaatatacgttttattactcaaggtgatatctttccacatttgtgcattactactagctatacgagtgatatcacgaaaaccaccagctgcaagtttattaactaaatgatgttcttgaccgttcttttgactaacatgaactaaactagatgcaacgatatgaggtaaatgacttacgacgcttgttacgtagtcgtgttcttcagcagtagttacaataaatttagcaagagtaggtgataacagttcttttaacgtgtttgctgcttgctcatttcttggctcattgtagactaaaatataataagcgttttcaaataagtgctttttagcatttagtacaccagatttatgactaccagccattggatgaccactgactaaatgaatattatgctttaataaattgcattcgtgttgctgtatcattgctttagtactaccagtatcagaaacaataacaccaggtttagttggcatatctataagctcgctaagatatttatttgtgatagcaacaggtgttgcataaataattacatcggcttttttaatagcttcactataatttaaacatttttcattaataatgccgattgatttagctttatctaactgagaagtatctgcatcgtatgcaataatattagtattagggttatggtattttatattgctagcaagacttccaccaattaatccaagcccaacaaataaaactgttgtcatataaatcaccttatttcgaaattttcagaataataacattgtaaatgagctgttgacacagtgcaatagtaaataaaaatcgataatagcattaatagataaacggagataaatcatctacaataaagagtatagtaacacaatggcaacggaggggtaaatcaatggaaccaatattagaaatgattaaaacattaacaggtattaatagtccttcaggagacacagaagaagcaattcaatttgtcgaaaaatatgcaaaagacttgggttatcaaacaacactaacaaataaaggtgcgttattaataacagtgccaggcaaaaatgatgaagtacaacgctgtattactgctcatgttgatactttaggtgcaatggttaaagaaattaaagaagatggtcgcttagcaatagaattaattggaggattcacgtataacgcgattgagggtgaatattgccaaattaaaactgatgctggtcaaatatatacaggaacaatttgtctgcatgaaacaagtgttcatgtatatagaaataatcatgaaatacctagagatcaaaagcatatggaaataagaattgatgaagtaactacatcagaagaagatacaaagagtttaggtatttcagtaggtaattttgttagctttgatccacgtacagttatcacgtcatcaggttttattaaatctcgtcatttagatgataaagctagcgtagcgatgatactacaattactaaagaaattaaaagaagagcaaataatattaccacatacaacgcaattttatatttctaataacgaagaaataggttacggtgcaaatgcatcaattgattcgaaaatcaaagaatatattgcattagatatgggcgcgttgggagacggtcaagcatcggatgaatatacagtttctatttgtgccaaagatgcttcaggtccatatcataagcaattgaaatcgcacctagttaatctttgcaaaataaataacattccatataaagtagacatatatccatattatggttcagatgcttcagcagctttacatgctggtgcggatatcagacatggtttatttggcgctggcattgaatcatctcatgcaatggaacgaacacatattgattctattaaagcgacagagaaattactatatgcatattgcttatcaccaattgagtaaacaattagtgttgacaaatgtgaacgacctatgtaatataatgaactataaaaataattagaattttctaaagaaatagtagcagatatgaaacgtagcaaatagaaagctaatgggtgatgggaattagcacgccatatcttgtgaattggactttggaaaacaattgaatgagttttgaaagtgaacatgaattatgttaactaaggtggcaccacggtaacgcgtccttacaggtatatgcgttatgtggtgtctttttatttagacaaaatgtagtagttaattaaaggtagcaacagaaagttagtggatgatgtgaactaacaccgagattaatgaaattgggttttgtctgcaacagaaaaattatatatagtaaagagtgaactatgaatatttcgaatattcggttaatttaggtggtaccacgcgtcagcgtcctttatattgataaggatgctggcgcttttttgaaaggagcgtatagaatggatatattttataaaaaaataaaagcaaatgtaacgcccgaagttttagcacaacttcattccaagaagatcattttggaaagtacaaatcaacaacaaactaaaggtcgctattcagttgttatttttgatatttatggcactttaactttagataatgatgtattatcagtaagtactttaaaagaatcgtatcaaatcactgaaagaccgtaccattatttaacgactaaaataaatgaagactaccataatattcaagatgagcaacttaagtcattaccatttatatctggatatgttgggacgtgtagctttgatttagtaagacatgaatttcctaaattgcaatcaatacaattagaagatcacaagcagcacgatgtaaggttatatatggttgaacaagtttatgtatttgaccattacaaagatgagttatatatcatcgcgacgaatcaattttcaaattcaacaaaatcagatcttgagaatcgagttattaagtctatcgaagacttaactaaaatccaaccattcatgcctacacaagattttgattttaaaactaaagaaattcaatcaaacatttctgaagaaagatttatcgaaatgattcagtatttcaaagagaaaataacagaaggggatatgttccaagttgtgccatcaagaatttacaaatatgcgcatcatgctagtcagcatttaaatcaactttcgtttcaactgtatcaaaatttaaaacgacaaaacccaagtccatatatgtattatcttaatatcgatcaaccatatattgtcggtagttctcccgaaagtttcgtaagtgtcaaagatcaaattgtaacaactaatcctattgcaggtacgattcaacgtggtgagacgacacaaatagataatgagaatatgaaacaactacttaatgatccaaaagaatgcagcgaacatcgtatgctagttgatttaggacgtaatgatattcatagagtaagtaaaatcggtacctcaaaaattactaaattaatggttattgaaaaatatgaacatgttatgcatatcgtaagtgaagtcacaggtaaaataaatcaaaatttatcgccaatgacagttattgcgaatttattaccaacaggtaccgtttcaggtgcaccaaaattacgtgcaattgaaagaatatatgaacaatatccacataaacggggcgtttatagtggtggtgttggatacataaattgtaatcataacttagattttgcattagcaattcgaacgatgatgatagatgagcagtatatcaacgtagaagctggttgtggcgttgtatatgattctattcctgaaaaagaactgaatgaaacgaaattgaaagctaaaagcttattggaggtgagcccatgatcttagttgtagataattatgattcctttacatataacctagtggatattgttgctcaacatactgacgtcattgttcaataccctgatgatgataatgtgctgaatcaatcggtggacgctgttattatatctcctggtccagggcatccattagacgatcaacagttaatgaaaatcatatcaacctatcaacacaaacccattttaggtatttgtttaggggctcaggcactgacttgttactacggtggagaagtcattaaaggcgacaaggttatgcacggcaaagttgatacactaaaggttatatcgcatcatcaacatctgttatatcaagatataccagaacagttttcaattatgagatatcattcattaataagtaaccctgacaattttccagaagaattgaaaattactggacgtaccaaagattgtatacagtcattcgagcataaagaaagaccgcattatggtattcagtaccatcctgaatcatttgctacagactatggtgtcaaaataattacaaatttcattaatctagtgaaggaaggatgaaaaccatgacattactaacaagaataaaaactgaaactatattacttgaaagcgacattaaagagctaatcgatatacttatttctcctagtattggaactgatattaaatatgaattacttagttcctattcggagcgagaaatccaacaacaagaattaacatatattgtacgtagcttaattaatacaatgtatccacatcaaccatgttatgaaggggctatgtgtgtgtgcggcacaggtggtgacaagtcaaatagtttcaacatttcaacgactgttgcttttgttgtagcaagtgctggcgtaaaagttataaaacatggtaataaaagtattacctcaaattcaggtagtacggatttgttaaatcaaatgaacatacaaacaacaactgttgatgatacacctaaccaattaaatgaaaaagaccttgtattcattggtgcaactgaatcatatccaatcatgaagtatatgcaaccagttagaaaaatgattggaaagcctacaatattaaaccttgtgggtccattaattaatccatatcacttaacgtatcaaatggtaggcgtctttgatcctacaaagttaaagttagttgctaaaacgattaaagatttaggtagaaaacgtgcaatcgttttacatggtgcaaatggtatggatgaagcaacactatctggtgataatttgatatatgaattgactgaagatggagaaatcaaaaattacacattaaatgcgactgattatggtttgaaacatgcgccgaatagtgattttaaaggcggttcacctgaagaaaatttagcaatctcccttaatatcttgaatggtaaagatcagtcaagtcgacgtgatgttgtcttactaaatgcgggtttaagcctttatgttgcagagaaagtggataccatcgcagaaggcatagaacttgcaactacattgattgataatggtgaagcattggaaaaataccatcaaatgagaggtgaataatatgacgattttatcagaaattgttaaatataaacagtcacttttacaaaatggctattatcaagacaaacttaataccttgaaaagtgtgaatattcagaataaaaaatcttttataaacgcaattgagaaagaaccaaagctagcaattattgcagaaattaaatcgaagagtcctacagttaatgacttacctgaacgagatttatcgcaacaaatctcagattatgaccaatatggtgcaaatgccgtgtccattttaactgatgaaaagtactttggtggtagttttgaaagattacaagcattgacgacaaaaacaacattacccgtattatgcaaagactttattatagacccgcttcaaattgatgttgctaaacaagctggtgcatctatgattttattgatcgttaacatcttatctgataaacaattgaaagatttatataactacgctatatcgcaaaatctagaagtgttagttgaagtacatgatcgccatgaattagaacgtgcctataaggttaatgctaaattgattggtgtaaataacagggacttaaaacgatttgttacaaatgtggaacatacaaatactattttagaaaataaaaaaacaaatcattattatatttctgaaagtggtattcacgatgcatctgatgtaagaaaaatcttgcatagtggtatcgatggcttactaataggtgaggcgcttatgcgttgtgacaatctatctgaatttttaccacaactgaaaatgcaaaaggtgaagtcatgatgaaattgaaattttgtggctttacatcaataaaggatgttacagcggccagtcaattacctattgatgcgataggtttcatccattatgaaaaaagtaaaaggcatcaaacaattacccaaataaaaaagttagcgtctgctgttccaaatcatatcgataaagtatgtgtcatggtaaatcctgatttaacaacaattgaacacgtattaagcaatacgtcaattaacacaatacagttacacggcacagaatctattgattttatacaggaaattaaaaagaaatattcaagcattaaaatcactaaagctttagctgcagatgaaaacataatccaaaacataaataaatataaagggttcgtagatttatttattatcgacacaccctcagtgtcgtatggtggtaccggtcaaacatatgactggactattttgaagcacataaaagacataccttatttgatagcaggaggcattaactctgaaaatattcaaacagttaatcaacttaaattatcacatcaaggttatgatcttgcatcaggtatagaagtaaatgggcgaaaagatatagaaaaaatgacagcaattgtaaatattgtgaaaggagatagagacaatgaataaacaaatacaaacagaagcagatgaattaggtttctttggtgaatatggagggcaatatgttccagaaacattaatgccagcaattattgagttgaaaaaagcttataaagaggcaaaagcagacccagagtttcaaagagaactggaatactatttatcagagtatgtaggacgcgcgacaccacttacatatgctgcatcatatactgaaagcctaggtggcgctaaaatatatttgaaacgagaggatctaaatcatacaggcgcccataaaattaataatgcgttaggtcaagcgttgcttgctaaaagaatgggcaagaagaagcttgttgctgaaactggtgcgggtcaacatggtgtagctagtgctacggttgctgcattatttgatatggaacttgttgtctttatgggaagtgaagatattaaaagacaacaacttaatgtatttagaatggaattacttggtgcaaaggttgtggcagttgaagatggtcaagggactttatcggatgcagttaataaagcattgcaatattgggtaagtcatgtagatgatacacattatttattaggttctgcattaggtccagacccgttcccaacgattgttagagattttcagagtgtgattggtaaagaaataaaatcacagatattgaagaaagaaggtcgacttccggatgcaattgtagcatgtatcggtggtggctcaaatgcaatcggtacattttatccatttattaaagatgatgttgcattatacggtgttgaagccgcaggtcaaggcgatgatactgataaacatgcacttgcaattggcaaaggatcacctggcgtattacatggtactaaaatgtatttaattcaagatgaagatgggcaagtgcaactagcacattctatttcagcaggacttgattatcctggtattggaccagaacattcttattaccacgacattggtagagtaacttttgaaaatgctagtgatacacaagcaatgaatgctttaatcaactttacaaaacatgaaggtattatacctgcaattgaaagtgcacatgcactgagttatgttgaaagactagcgcctacgatgtcgaaagaagatattattgtagtaactatttctggacgtggcgataaagatatggaaacaattagacaatatatggtagagcgaggtcttgcaaatgactaaattatttataccttatattatgggcaataaagatttgattgaaaatgcaacattgttgagtgaaaatggtgcagatataattgaaattggagtacctttctctgatccggttgctgatggtccagttatcatggaagcaggtcaacaagcgattaaacaaggcatcacgatagattatattttcaatcaattagaaaaacatggtgatcaaattaagtgtaactatgtattaatgacgtattataatattatttgtcattatggagaacaagcgttttttgaaaaatgtcgagatactggtgtctacggcttaattattcctgatttaccatatgaattatcgcagcgtttaaaacaacaatttagtcactatggcgtcaaaatcatatcgttagttgcgatgactactgatgacaaacgtataaaagatatcgtatcccatgcggaaggctttatttatactgtgacgatgaatgcgacaacagggcaaaacggtgcgtttcatccagaattaaaacgaaaaattgagtcaattaaagcgatagccaatgtgccagttgtcgcaggatttggtataagaacaccacaacatgttgcagatataaaagaggttgcagatggcattgtcattggtagcgaaatcgttaagcgatttaaatctaacacgcgtgaggaaatcattaaatatttacaatctatccaacaaacattgaataattaagtttacttgatttaaaaaaattaggcgaatactgtttgaaaaagtgaaaaacggtgaattataaaattgaatagaaatgatacaaaagtaatatgagcaaacccaaacgttcatattactttttttgaaattgtattcaaaaatctaaatattactataaaagtatacgcaattaaagcgtttatgttttagttttaacattaactattgtatacttatttagattagatttattatttttgacatttgcagaggggaaatagaaaaactgcaaatacggaaatgaaattaattaacgagagacaaataggagtaatgataatgaagtttacaaatttaacagctaaagagtttggtgcctttacagatagcatgccatacagtcatttcacgcaaactgttggccactatgagttaaagcttgctgaaggttatgaaacacatttagtgggaataaaaaacaataataacgaggtcattgcagcttgcttacttactgctgtacctgttatgaaagtgttcaagtatttttattcaaatcgcggtccagtgattgattatgaaaatcaagaactcgtacactttttctttaatgaattatcaaaatatgttaaaaaacatcgttgtctatacctacatatcgatccatatttaccatatcaatacttgaatcatgatggcgagattacaggtaatgctggtaatgattggttctttgataaaatgagtaacttaggatttgaacatactggattccataaaggatttgatcctgtgctacaaattcgttatcactcagtgttagatttaaaagataaaacagcagatgacatcattaaaaatatggatggacttagaaaaagaaacacgaaaaaagttaaaaagaatggtgttaaagtaagatttttatctgaagaagaactaccaatttttagatcatttatggaagatacgtcagaatcaaaagcttttgctgatcgtgatgacaaattttactacaatcgcttaaaatattacaaagaccgtgtgttagtacctttagcgtatatcaactttgatgaatatattaaagaactaaacgaagagcgtgatattttaaataaagatttaaataaagcgttaaaggatattgaaaaacgtcctgaaaataaaaaagcacataacaagcgagataacttacaacaacaacttgatgcaaatgagcaaaagattgaagaaggtaaacgtctacaagaagaacatggtaatgaattacctatctctgctggtttcttctttatcaatccatttgaagttgtttattatgctggtggtacatcaaatgcattccgtcattttgccggaagttatgcagtgcaatgggaaatgattaattatgcattaaatcatggcattgaccgttataatttctatggtgttagtggtaaatttacagaagatgctgaagatgctggtgtagttaaattcaaaaaaggttacaatgctgaaattattgaatatgttggtgactttattaaaccaattaataaacctgtttacgcagcatataccgcacttaaaaaagttaaagacagaattttttaggaagggaattatcaaaacatgaaatttacagagttaactgttaccgaatttgacaactttgtacaaaatccatcattggaaagtcattatttccaagtaaaagaaaatatagttacccgtgagaatgatggctttgaagtagttttattaggtattaaagacgacaataacaaagtaattgcagcaagccttttctctaaaattcctactatgggaagttatgtttactattcgaatcgtggtccagtaatggatttttcagatttaggattagttgattattatttaaaagagttagataaatatttacagcaacatcaatgtttatatgttaaattagatccgtattggttatatcgtctatatgataaagatatcgtgccatttgaaggtcgcgagaaaaatgatgccctagtaaacttgtttaaatcacatggttacgagcatcatggctttacaactgagtatgatacatcgagccaagtacgatggatgggcgtattaaaccttgaaggtaaaacacccgaaacattgaaaaagacatttgatagtcaacgtaaacgtaatattaataaagcgataaactatggtgttaaagtcagattccttgaacgtgatgagttcaatcttttcttagatttatatcgtgaaactgaagagcgtgctggatttgtatcaaaaacagatgattatttttataactttattgacacatatggagataaagtattagtaccattagcatatattgaccttgatgaatatgtgttaaagttgcaacaggaattgaatgacaaagaaaatcgtcgtgatcaaatgatggcgaaagaaaacaaatcagataagcaaatgaagaaaattgcagaattagataagcaaattgatcatgatcagcatgaattattgaatgcaagtgaattgagcaaaacggacggcccaattctaaaccttgcttctggcgtttattttgcaaatgcatatgaagtgaattatttctctggtggttcatcagaaaaatataatcaatttatgggaccatacatgatgcattggtttatgattaactattgcttcgataatggctatgatcgttataatttctatggtttatcaggtgattttacggaaaacagtgaagattatggcgtataccgctttaaacgtggatttaatgtacaaatcgaagaattaataggggatttctataaaccaattcataaagtgaaatattggttgttcacaacattggataaattacgtgaaaaattaaagaaatagatgtaaatgatgttagggcttatagttattgatactataggctcttttttatatgttttttaataaagcctcgaataatgatatattaaatgacaagtttaacaagtgattgcaataaatataaatatgaattgcacaacctatttgtaaatgattgagttgagtatactttttaattcattcaatatgactcaaaacaagccaatatgtattatatttttggtgaataaaccttagcataacaatttatgtctgattatatatgtgtgtgtttgcaagtgtgtgatatcaaatgtcatatttgtctaattgtaatttataaaatgcatgagcaatgattgctgtaacaaattctagcaaagtattcagtttgtattttagaaataaaaatgatgatagatgtatgatcgatataaaagatttaatatgcaccaaaacgtgagtaattggtttaatgaaacataacatgaatgtaaatttagcttactgacataaacactacacaaacatacagttatataagtccccttatggaatttcacattctagtttacataatatatattataggaagttatatgtgtgtaacgcaaaaggtaccctacatcataatcattatctaatatcgtcacataacttacttatgctataatcatggtattatattgtttggagtgatttgatgagatttgtctttgatattgatggtacgctttgttttgacggccgattaattgaccagactattattgatacattgttacaattacaacatgatggtcatgaacttatatttgcatcagcacgtccgattcgtgatttgttgccagttttaccatcagtatttcatcagcacacattaattggcgcaaatggtgctatgatttcacagcaatcaaagatttctgttatcaaaccaattcatactgatacatatcatcatatcttcaaaataattcaaaagtatgagttagattatattattgatgatgattggaattatgctgcacaacttgacgctgagaacgcgatttttgagcgtttagatccacataagctggccagttgtattgatgttgcaaatatcgacacaccaatcaagattattttattaaatatagacccggcacaaattacaactatattagacgagctagataaataccatcaagaattggaaatgattcaccattcaaatgagtataacattgatataacagcgcaaaatattaacaaatatactgcattacaatatatatttgatgcagatgttaaatatatagcatttggtaatgaccacaatgatattgtcatgttacaacatgctagtagtggctatattataggaccatcagaagcatacacacacgcaatattgaaacttgataaaatcaaacacatcaataataatgcacaagctatttgcaaagtcttaaaatcatataaataaaaacacccctatcaaatgataatcattatcaatcgataggggctattttaataaaattcgtcctcgaacatttcttcctcttcatctaatccaaataattctgccatttctccatgttcaattaacatgtttaaatatgcatcgcggagttcttcttcactcatatcattaatcatttctttaagactatcaatccacatatttctgcgtaattgatagtcttcttcaacttcgtttaacatcattatatgtttatttgctgcttctggactagctgtaaagagtaatgcaatcatatgtttacatatcactcgtcttccatcagcatgaggacaattacatatggattttctaggatgttccatatcaatataacaacgatatactttgttgccactgccctttacttcagcctcatgctgcgtttctgaaaatgattttaagttaatgacgcattcactttgataataattaaagcctctttctatagaacgaatacttgcaatatcaagtaatcccattaatgatactcctttttattattatttttaaataaagaaaataaaatagataagtgtctagattaaaatacttgatttatctatattttataacaagtctagaattatcgcattcttaaataactaatatgaaaatgcttgcactaattcttttgtataagggtgtctatcaacattaaataattcctctattgcaaaatcatcgactatcatgccatccttaagaacgataattctattaactaagcgttgtaacacggataaatcatgagaaataacgataaaatgatttaagttcgtaatcgtttgcgcttttaatatattgattacattttgttcagctataacatctaaatttgaagttatctcatcacatattaaaacgcgaggctgtgctaataacgaacgcatgacattaaatctttgtaattgtccgccactcacttcgcttggtaatttagtcaataattgcgcgtttaactcaaaagtagataaatgttgtaataataattgatcctgagcagtattatcagttagacctctgtaataatataacgcttcttttaatgaggtctcaatcgtccaatcagggttaaagctagttaaagggtgttggaaaatcggtaacacagcattgtcacttaagtaaatctctcctttaacaggtttaaacaagccaagaaccaatgaagcgagcgtacttttaccacagccactttcgcctaaaataccaacattttctccatcaggtatagtaatattgatatcttgtagcaccatctgctttttattataaccaaaagtcacatgttttaactcaatcatagtaatccctctttaattgtgttctatatttaattagacgttcagtatacggatgcaaatgctcatacttgaaatgattaatattacctcgttcaatgatttgaccttcttttaaaacataaatgtactgacaatatttcaatacatgacttaagttatgtgtgataataaataatgtttgaccatgttctaatacaatatgctgtaataaatccatcacttgattaccgttcaaagcatccaatgatgcaactggttcgtctgcaatgattaatttaggctccaacatgagaacgcttgctatgtatacgcgttcaagttggcccccagaaagttggaaactatatttatttaatatatctttgctttgtaaattaacccacgacaaagccttatcaactttggacaaagcctcttctttactacctttataatgcttacgataaatcgcagttaactgtttacctaatttagtatggtcgttaaaactttctgcataattttgagaaatatagccaattgtatgaccataatattgactcaatctactaacattttccccatcaaattggtacgaatcatacgtgcagcttaaatcaaatggtaaatattcaagtaaagctttagcaatcaaactttttccagcgccgctctctccaatcaaggcattaatctgttgactaaaaattttcaaatcaatccctttaataagagatttctcactagtattctttattgttaaattttgtatatcaatgagactcatcatattcaccccgttgtttcagcaatctatctcttagtgcatcaccggttaaattaaaaattaaaatagttatagcaatgactgaagcaggtgcaatcaacataattggatgagacgaaataaaatcacgaccttgttgcaacatagcgccccactctggtgttggcggttgtgcacctaacccaataaatgatagtgaacttatatatagaatgattttaccgaaatcaacgaccatcaaaacgataatagccggtataattttaggtgttaaatgacgtattaatattgttcttgttggtacatgaaataattgtgccatttttatataaggcttattcatttcgctattaactatacttctagtcaaccttgtgtaattcatccattttattaatgtaattgagataactaaattccataaagatggttgaaaaaaacttgctaaagcaatcatgatgataaattctggaatacttagaccaacatcaataaaccttaacactaatcgttcaatccacccttttttgtatccggcaaatagacctagtgtaacacctatgacaacgatagctattaatgttaaaacagtaacaaacaatgttgaacgtgcaccgataataattcgggtaaataaatctatcccataatcatcagttcctaataaatgcaaccaactaataggttcaaaagtttgtgataaattgactttggttgcattttcactactgacaaagaattgcagtacaattaccacaaaaataaatgcaacgaatacaaaaaatatcaggttattctttgaaaatattttatgcatgacggtcactactttctgatatcaatggtgtattggttttgatttttggatttcctaattgtaaacgctgcttcggatcaagtaataacgttaataaatcagcaatcgtattgataataacaacgaagaagccaataaataacacgcatccttgaataacaggataatctcgagatttaatactatccattaatagataaccaataccaggtatatcaaataaattttcaatcactacagtaccacctattagactgccaagtgaaatccctagtaatgggataatcggcaaaattgttggttttagtaaatcatgaattaaaatataacgttcattcataccgcgtaatcttgatgcttgtacgatattactttgcaataacatcaataaattagaacgcactaaacgaatgatgtatgcacacatacctaaagatagcgtgattacaggtaatataaactgacttagtataacgctatctatattcattaaatttgtgacaataaataataaaataataccgataaagaacgctggtaaactaatcgatagtgttgagatcactctaatcactttatccgtccacttatgaaatcgtttggctgctataatgccgagcggtatagatatgcataacgacactactaatgttgaaaatgatatgagtaatgttatgggtgcatagttgaataatatctgtgttaccggttcttttgattcaaaactttttcctaaattaaaatgtaataaatgattcatccaatgccaccactgtaccaataaagaatcatttaatcccaatttatctttggttgcatttatttgttccgtcgacacttgtgctacatcaagatgtaatattttatcaacaggattgcctggtgataatttcattaaaatgaatgtaagtgtagaaataacaaataaaacaactatcatttgcatcagtctatacaacatagactttattatgaacataatagtccccctccttgtgtaagttactaacactttctttttacatgagaatggcgcatgtatatgcaacttacatattaagaactaacgttcattatagtattatccataaagaaattgaagtatatttaattttttaaaaaaatcattataaaatataatattttgaatcaagtcaaccatgtaaaatataaaaaagtcaaaacaaaaacaactatagcactgtattccatctctttcgaaataattgttactgcagtgtaacttaaaagtcgatgattttgtgcatatagttgtcgaatattattttttatctttacggcgaagttcagcgccctcatagccgtatttttcaatttgcttttctaatttacgcgcttttctttctttacgccaatttctagtaaaataccataatagaaaactaattaataaactcataatcgctaaaaatgcagcgtatcctaataatggttgatattttatatcttgaaaatttggaataaaaaatgcaagcacacctaatataacaaatgtaattactgcagatacaaaccatttatttaaaactaagcaacagaatattgttaataaaatcattattaatgttgtgatccataaataattaggcatatcgaataatgtcatattcattctccttttatttcattactttccttgtatacattttattataaatttttaaaaacttaaacaatagcagtcagtttcaagcaatattctatctactaatagaaaaatcattgttccttgcgacatggaaatcgtaacattatcgtttaggagacaaaattatgtataatgaatgtattataccaaaggagtgattatatgtctcaaggtttacctttaagagaagatgttcctgtttcagaaacatgggatttagtagacttatttaaagatgatcaacaatattatgaaagtattgacgctctagtacaacaagcaaatcaatttcatcatacatatgcaacaacattaaattcaatcgaacaaattaatactgctttagctgaattagaaaatattttaattgccttagatcgcttaagtaattatgcagaactacgtttaagtgtagatactagtaatatcgaggcacaagtattgagcgctaaattatctactacatacggtaaaattgttagccaattatcatttgtagagtcagaaatacttgaattaccagaagaaatacttcaacaattagaagaatcatgtccatatcaacactatattaaacagttaataaaacaaaagccattccaattatctgcgtcggtagaacaagtattagcaactttatcacctacgctaaacagtccttacgatttatacggcacgacaaaaatgctagatattacattcgattcatttgaacatgatggtacaacgtaccctgtcgactatgctacgtttgaaaatgattatgaagataataaagatcctgagtttagacgtaaaagtttcaaatcgtttagcgatgggattcgaaaatatcagcatactaccgcggctacatataatatgcaagtacaacaagaaaaaattgaagctgatttacgtggatttgaatcagtcatcgattatttattacatagtcaagaagtaacgcgtgatatgtttgaccgtcaaatcgatatgattatgcgtgacttggcaccagttatgcagaaatatgctaaacttttacaacgtattcacggattagataacatgcgttttgaagacttgaagatttctgtagaccctgattatgaaccagagatttcaattgaagactcaaaaaattatattttcggtgcgttaagtgttttaggtgatgactatacaaacatgttacgtgaagcatacgatcagcgatggattgattttgcacaaaataaaggtaaagatacaggcgcattttgtgcaagtccatactttacacattcatatgtgtttatttcttggactggtaaaatggctgaagcatttgtcttagcacatgaattaggtcatgcaggtcattttacattagctcaaaaacatcaaccatatcttgaatcagaagcatcaatgtactttgttgaagccccttctacaatgaatgaaatgttgatggccaattatttatttaacacaagtgataatccaagatttaagcgttgggttattggctcaattttatctagaacatattatcataatatggttacccatttattagaagctgcttatcaacgtgaagtgtatcacaaagtagatcaaggtgaatctttaaatgcgccgacattaaatgaaataatgctaaatgtttataaacaattttttggagatgcagtagacatgactgagggtgctgaattaacatggatgcgtcaacctcattactatatgggattatattcgtatacgtattctgctggcttaacaatcggaactgtcgtttctcaaaagattaaaaatgaaggccaaccagctgttgatgcttggttagaaacattgaaaaaaggtggtagtgtatcacctgtcgaacttgcaaacattgcaggtgtagacattactacagaacagccacttaaatctacaattcaatatatttctgatttagtcgatgaagttgaaaaattaacagatgaaattgagcaagcaaataactaagatgcgagacaatttatagtagaacaatataaaccaagattttcacattactaattgtgagaatcttggtttttttgagggtttatgaataatagaaatatatatttatcgtaagggattttatagtaataactttaagttattgttcgtaatgtgtacctgttaaataaaaataaacactttcagcgatgttaataatatgatcaccaatacgttctaaatgtcttgctgctaaatgagcttgtgcagcgacaaatggatcgttatcaataagatacgttgcgttaataatatgactatataagtcatcgatatcttcatcacgctcaattatttctcttattaatacggtatctttctttttaaatgcttgatctaagtcctttaacattaacatagctaatttacccattgtctttaaacgggttaacacataatcatctgtaatctttgtacgcaatcgaatattggcaatactcgaggcattatctcctattctttctaaatcggaggcgatttttaatgaagaaatcatcatacgcaaatcactcgcaatgggctgttgctttgtaattaacatgataactcgctcattaatatcataatttaattgattgatatgtttatcgtttttaactgtttgtcgtgcaaagcctctatcgtcaatacttaatgattttataccattttcaatactcacatagacatttgcacctaaccgacgtaattcttttattaaatcatcaagttgctcctgatatcgttgtctaattattgccattatatatcaaccaaaccttcctgaaatataatcttctgttttcttgtttgatgggttagagaaaattttatcagtatcatcatattcattgacataaccatttaagaaaaatgcagttttatctgatacacgagctgcttgttgcatattatgtgtaaccataataattgtatacttttcttttagttcttgaaccaactcttctactcttaatgttgagattggatctaatgctgatgtcggttcatccattaaaatgacttcaggttcaattgctaaacaacgcgcgatacaaacacgttgttgttgcccaccggataaactatatgcatttgtgtgcaacctatcctttaattcatcccaaattgcagcgccacgtaatgatttctcaacgatttcatcaagaacttttttatttttaataccgtgaatctttggaccgtaagtaatattatcgtatattgattttggaaatggattaggttgttgaaagaccatgcccacatttgtacgtaattgttctttagaatatttttgatcaaaaatgtcttgatctcgatataatattttaccagctgttttcacagaaggtactaactcaaccattcgattcaaagttttaatatatgttgatttgccacaaccagatggacctataatggcagtaatttggttttcataaatatctaaattaatattttgtaatgcatgattttcgccataccataagtctaaattttgtgttgaatatataacagaatgtgagtttgtatcatctggtgttttatgatgactttgtgagacatcaaacgtatgactttgagatatttgtttagtttgtgcaagtgtttgcgccatatttaaaactccctttttaatagataaatgagattgattgtttaaattagaattttttactaaatttgttacgtaaaataatcgcaacgccattcattaagattaagataactagtaaaacgataatgcctgccgatgcaacattctggaattcttcttgaggcattttcgcccaagtaaatatttggataggtaatgctgaaaattgatccaatatacttctaggtgttgccaataatatagtcggtataccgattagcacaagtggcgctgtttctcccagtgctcttgaaagagacaaaatgaatccagttaaaataccaggtaacgctgctggtaagacaacacgtcttatcgtttgccatttattagcacctaagccgtaagaagcttcgcgtactgagttaggtacagctctaattgcttcctgacttgaaacaataataattggtaatatcagtaaggtcattgttagcgctgctgccaatatactgttacccattttcaaggcttcaatccctgcaccaccaacgaacaaagtataacctaataacccaaatacaactgatggtacaccagctaaattggaaatactgattttaacaaactgagtaaatttgttgtttttcgcatattcttctaagtatatagctgtacctattcctaggatgattgataatggaatgatacttaacattaaccaaagtgaaccgattaacgcgcctttaacgccagccatagatggtgttgaagaagaaaaattagtgaaaaactgtaaatttaaatgacttacccctttaatcaatgtttgagttaacaacgcaataagtacgacaagtcctaataatgtacatgctaaaaatatgagtttgaacactttatttttaaccgttctggatgataaatgtttttggacaagttgttgatcgacgagtgattgtctattattatctgtcgtttccatattaatactcctccctaaaacgcttagaaatccactgagaaagtaaattcatgattaaggtaaagataaatagtgtgaaccctacagcataaatactgtaataaatatttgatccaaatgttgcatcacctgtcgctatctcaacaatatatccagtcattgtttgaatcgaacttgttaaacttaatgaagctgttggcgaactacctgccgctaatgatacaatcatcgtttctccaattgctcttgaaatcgcgagaacgattgaagctacaatacctgatgttgctgcgggaagtacgactttagttgctacttctaatttagttgctccaagtccataggcaccttctcgaattttatttggtacagatgccattgcatcctcactcaaacttgtgatgagagggacaatcataataccgacaactaagccgggacttatagcattaaactctccaagacctggtatgaaagatcttaatactggtgtaacaaaggttaatgcaaagaaaccaaacacaattgttggtattcctgctaaaatttctaatatcggtttaattatgcgtcgtgcacggtcacttgcatattcacttaaataaattgctgcaccaagcccgactggaactgcaaatatagtcgcaataactgtgatttttaaagtccctattatcaatgcccagataccaaacttagggtctgaaccggtaggattccaagtagtagaaaatagaaattcagttattggaattctggtgaaaaaagtgatggtttctaaaagcaatgtgattaatatacctagtgttgttaaaatggaaatcgctgaaattgcggctaaaataactggtataattttgtcattatgctttccttttttattattatttttttcgattaaagctttaacattagtagatgaagtcataatcaaacctctttctattactcccaaaataattagatttgtaaaataatgatgaaccactattttaagttgataagcttgtagactaactgaatgtcaaaatcagcgtctcgataaatcaagctttgtactctaaataatgattcaccatcaaaatcatgtttcaagacacatttgaaattgcgtcttattattttttgtcttcagactttttatcatcagatttcttgtcgtctgatttttgatttttatcaataaatgcttttaaatcatctaattgtgatttgtatgttttctctggtgctgctacatatccagcttcttcagctgctttacctttatcttctaagacgaatttgataaattctgacattactttattatctttcaatgctttttcatttacataaatgaataatggtctacttaatgcataagagttatcttgaattgtttttttcgtaggctctgttgctttaccattttcatctttgattttaacttcttttaatttatctttattttgtacgtagaagttatatccaaagtatccgattccctctttgtttttcgttacagaagaaacgatagcatttgtatcagcatttttttctgctttaatatcttctttattcattacttcattttcaaagaagtcataagtaccatgacttgagtttggtgatacagcatttatttttttatctggccatttactattaacatctttccatgttttagcttttccagaataaattgcttttaattgctgtttgtctaattcatctacaaaatcattttctttatttacagcaaccgttacaccatcttgcgcaattttgaattctttgtatttgatattcttatcttgtaatttttgcttctcttcatctttaattggtctagaagcatcagcgaagtcgatatctcctgcaatgaatttttggaaaccagcacctgtaccagcttgtcctgctgagattttagcatccgagtgatcttgagcccatttttcatttaatttctccacaattggtgctactgttgatgagccatcacctttagcttccccttttaaatcactattaccactgccaccattaccgccaccacaagcacctaataatagtgttgcacctaaagctgtagtaccaacaaattgccattttttcattgaaatatcctccctgtatgaacaacaaatagtatttgtattgattacatctttatcttaaccttgaattattaacctcatttttagaaactgtaaatgttacataaaaaattgttaagaaaatgtaaatattaatttttgttaatctaaaaaatattgcttcattagtaaaattaaaatgcttcctgaaaaattatcgaaatttaaatatgaatacaaaaatggctgggacataaatccctaaaaaaacagcagtaagatatttttcaattagaaaatatcttactgctgttctctatttatacaatacttcgtattgaatggcttcgctttgcccgtctgtcacattactgtaaaattctataaatagaatttttgatgacgggtcccttcctagggtgccgtctcagccaccccaaccggcacattgttgtaagctgactatatgtcagcttctgtgttggggcccctgtcttcgactggcactgctccctcaggagtctcgccattaatactacgtattaacatgtaattttactttgaaatacattaaagcccaaattaatcaaaagctttctgaaccagaaacgaaaaaaatctatagtcatagaaaaatttatgtagagcctgtttttggatttatgaaggctattttgggtttcactcgaatgtcagttcgaggaataaataaagttaaacgagagctaggttttgtattaatggcacttaatataaggaaaatagcagctcaacgagctgtacattataaaatacatatcaaaaaagctgatttccatcaaataattaatagaaatcagcttttttacattgcctaagaacttaatgtcccagcctattcgtttgaattatttaattttttactttgaaaggaatgtttaaaaaactacttcatctgtccgatttaatattgaataaaaaaaacacgcatcctacgacacgtgtaaaaatgattattcttttgagtccattcgactccaaccttttttagttaaagcgattttacctgtttctatattaataatcttctgtttatataagtgaccgattgcacgtttgaatgaacctttactcatattgaatacttctttaatcgcttcagggcttgatttgtcccagaatggtaattcaccatcatattcaactagtaaatcaaagatgacttggccgtcatcgtctaaacgttcatgtgcaagtggtaaaaatgaaccatttaactcacctttatcattatgcccgataattctaacttgaacagattcacctaatcttggttcagctttacgttctgattcatgtacgaaaattttgtaacctgattcgcttaataaaaagctaccaattcgtaatacgcggtaaggtttggcttcaatgacttcgttttttaaattatcgtcgtgtacaggtgtaaacatattttctacaacagattcactcgctaaacgtccatacatatgattctcacggtcaattcgtaatgtaactagcaaataatcaccaggttgtggccatagtgatttcacttttggtaaatcttcccatggtactaacacttcacggggtaatccaacatctatacgtgccccatcgcgatccgttttaagtactttagcaaagtcatatttatctttcgtaatatcaggcatattttgagttgcaaataattcacctgaacggtttggataaatgaagaaactatattcttcacctacttctaattcatcatcatcgttcatttctgattggtttaactttacgttttcaccgtttggtccttttaaaaggtaagttgaaccttgtaaccctactacttcaaggaattctatagaacctactatatctttgtctaatgccatgttattctccttcgattcttgtattctttattattataacatgtgtgagtcattctatcattacaacttatatgaggtcgaaactgtgacgataatatgatataattcttccgttagaatatcgaatgaaaaaaaggagaaaatgcatgttacaagtaactgatgtgagtttacgttttggagatcgtaaactatttgaagatgtaaatattaaatttacagaaggtaattgttatggattaattggtgcgaatggtgcaggtaaatcaacattcttaaaaatattatctggtgaattagattctcaaacaggacatgtttcattagggaaaaatgaacgtctagctgttttaaaacaggaccactatgcttatgaagatgaacgcgtgcttgatgttgtaattaaaggtcacgaacgtctttatgaggttatgaaagaaaaagatgaaatctatatgaagccagatttcagtgatgaagatggtatccgtgctgctgaacttgaaggtgaatttgcagaaatgaatggttggaatgctgaagctgatgctgctaaccttttatctggtttaggtatcgatccaactttacacgataaaaaaatggctgaattagaaaacaaccaaaaattaaagtattattagcgcaaagtttattcggtgaaccagacgtactattactggatgagcctactaacggtctcgatattccagcaatcagttggttagaagatttcttaattaactttgataatactgttatcgtagtatcgcatgaccgtcatttcttaaataatgtatgtactcatatcgctgatttagacttcggtaaaattaaagtttatgttggtaactatgatttttggtatcaatctagtcagttagctcaaaagatggctcaagaacaaaacaagaaaaaagaagaaaaaatgaaagagttacaggactttattgctcgtttctcagctaacgcttctaaatctaaacaagcaacaagtcgtaaaaaacaactcgagaaaattgaattagatgatattcaaccatcatcaagaagatatcctttcgttaaattcacacctgagcgcgaaatcggtaatgacttactaatcgttcaaaatctatctaaaacgattgacggtgaaaaagtattagataatatttcattcacaatgaatccaaatgataaagcaattttaattggggatagtgaaattgcgaaaaccacattgcttaaaatattagccggtgaaatggaaccagacgaaggttcatataaatggggtgtaacaacgtcattaagttacttccctaaagataactcagaattctttgagggcgttaatatgaaccttgtagattggttaagacaatacgcaccagaagatgagcaaactgaaacatttttacgcggcttcttaggccgtatgctatttagtggagaagaagttaagaaaaaagctagtgtactttcaggtggagaaaaagtacgttgtatgctaagtaaaatgatgttatcaagtgcaaacgttcttttacttgatgaaccaacaaaccacttagacttagaaagtattactgctgttaatgatggacttaaatcattcaaaggttctattatctttacttcatatgactttgaatttatcaatacaatcgcaaaccgtgttatcgatttaaataaacaaggtggcgtttcaaaagaaattccatatgaagaatatttacaagaaatcggcgttttaaaataaacataatatgtagaatttcttttcgaaaatctctgtattgaggcccgaccaacttgcacattattgtaagttggcttactgtcaccttctatattgggacttattccgcaacttgtattgtttgtagaaattaggaatccaatttctctatgtgttgcaccgacaaggattgaaaaaagctagctacaaagtcattttcattcagtcaactactgtcaatataacattgcagggcctagggcattgattcatgtccgagactatattcaatttaatagacattaactgggcgtctcgatgctaatatttatagcatcgaggtgtcctttttattttattttttaacacatcagcatagtgaacaccccttctctaaattacaaatacagttatcaacgcattaaaagagtacatttatttaatgtgcatattgattatgctataagtattttgaattttatttttcaaaaagtctcattatcaccaccttttaaaatataagcaacgctataacttgaattttcaggttattccaaaaaatctaaattatcggtttacattcatatttgtcatatgtataatgaacacataccaatttaataatattttgatgaggcgcatcaatcatgagtaaagtttagattactgtctgctaacagctaaatttgaaagggtgcgatgccgaagcaattataatagcagttataatttgttggactttttggttaagagctgagagtttgtcattatttaaaaataatggagtgcatcacttgtatatagattaagagcaagttcgcattccgaacttgttctttttttattattgtgtgcccttcctaacaattaggaggattatatggtaacaagaagtgtgttgaaatttggcggatcatccgtcagtgattttacaaaaataaaaaggatcgctgaaatgttaaaggagcgagtcaatcaagatgaacaattaattgtcgttgtaagtgctatgggtaacacaacagatcaattaatgacgaatgtatcaaccttgactaaagcaccaaaacaacaagaactggcattattattgacaaccggagagcaacaaactgtatcttatttatcaatggtattaaatgatatcggtatgaatgccaaagcaatgactggctatcaagcgggtattaaaaccattggccatcatttaaaaagtaaaattgctcaaattaatcctcaaacatttgaacaagcctttcaagaaaacgatattttagtagttgctggatttcaaggcatcaatgaacatcaggaattaacaactttaggcagaggtggttctgatacgaccgctgtggcacttgctgttagtaatcaaataccttgtgaaatttataccgacgttgatggtgtgtatgccactgacccaagacttttaccaaaggctaaacgactagacatcgtctcatatgaagaaatgatggaaatgagcgctttaggtgctggtgtacttgaaacaagaagtgttgaattagctaaaaactataatatccctttatatttaggaaaaactttatcgaacgtgaaaggaacatggattatatcaaatgaagaaatattagagaaaaaagcagttactggtgtggctttggataaacatatgatgcatgtaacaattagttatcccctacctgacaatcagctacttacccaactatttacggaacttgaagaaggtgctgtaaatgttgatatgatttcacaaatcgtcaacttggatgggctacaactatccttcacgattaaagatagtgattttcatcaaatttctatgattcttgaaacattaaagaatcaatatgaagcattagcttataaaatcaatgagcattatgtcaaaatttcattaattggctcaggcatgcgtgatatgtcaggtgtggcatcaaaagcatttttgacattaattgaaaataatatacctttctaccaaacaacaacatctgaaataagtatttcatacgtcattgatgattttaatgggcaacaagcggtagaaaaactatatgacgcatttaacatttaatggtaaaatgattgttaaaatattctaaaaattggaaattattataaaatggagtgacaagttatgacaaagttagcagttgtgggtgcaacaggattagtaggtacaaaaatgttggagacattaaatcgtaaaaatattcctttcgatgaattagtattattttcatcagcacgttctgcagggcaagaagttgaatttcaaggaaaaacatatacagttcaagaattaactgatgctcgtgcaagtgaacatttcgattatgtattaatgagtgctggtggcggtacaagcgaacactttgccccactttttgaaaaagctggtgcaatcgttatagacaattcaagtcaatggcgtatggcagaagatattgatttaatcgttccggaagtcaatgaacctacatttacaagaggtatcattgccaatccaaactgctctacgattcaatctgttgtacctctaaaagtattgcaagatgcttatggtttaaaacgagtggcatatacaacatatcaagctgtatcaggttcagggatgaaaggtaagaaagatttagctgaaggtgtaaatggtaaagcaccagaagcatatccacatccaatttataataatgtgttaccgcatattgatgtgtttttagaaaacggatatacaaaagaagaacaaaaaatgattgatgagacgagaaaaattttaaatgcgccagacttaaaagtaacagcaacatgcgcacgtgtgcctgttcaagatagtcatagtgttgaaattgatgtaacgcttgacaaagaaacaacagcagaagatattaaagcgttatttgatcaagatgaccgcgttgttttagtagacaatccagagaacaatgaatatccaatggcaatcaattctactaataaagatgaagtgtttgttggccgtatacgtagagatgattcattagaaaatactttccatgtatggtgtacatcagacaatttattaaaaggtgctgcattaaatgctgtacaagtattggaacaagttatgcgtttaaaaggagcgaattaaaatgacacatttatttgagggtgttggcgttgcacttacaaccccttttacaaataacaaagttaatattgaagctttgaaaacacacgttaattttttactagaaaataatgcccaagcaatcatcgttaatggaactactgctgagagccctactttaacaacagatgaaaaagaacgcattctaaaaacagttattgatcttgtagataaacgtgttcctgtcatagcaggaactggcactaatgatactgaaaagtcaatccaagcttcaatccaagctaaagccttaggggctgatgcaattatgttaattacgccctactacaacaaaacgaaccaacgtggtttagtcaaacactttgaagcgattgcagatgctgtgaaattaccagtcgtgctgtacaatgttccttcaagaacgaacatgacaattgaaccagaaactgtagaaatattaagtcaacatccttatatagttgctttaaaagatgctacgaatgattttgagtatttagaagaagtgaaaaagcgcattgatacaaattcatttgcattatatagtggcaatgatgacaacgtcgtcgaatactatcaacgtggcggtcaaggggttatctctgttattgccaatgtcattcctaaagaatttcaagcgttatacgatgctcaacaaagtggattagatattcaagatcaatttaaaccaatcggcacactgttatcagctttatcagttgatattaacccaattcctattaaagctctaacaagttatttaggatttggaaattatgaattacgtctaccattggttagcctagaagatacagatactaaagtgcttcgtgaaacatatgacacatttaaagcgggtgaaaatgagtgaaaatattactaattggctatggcgcaatgaatcaacgcgttgctagattagcagaagaaaaaggacatgaaatcgttggggtcattgaaaatacaccgaaagcaacaacgccatatcaacaatatcaacatattgcagatgttaaaggtgccgatgttgcaatagatttttcaaatccaaatctgcttttccctttattagatgaagattttcatttgccattagttgtggcaacaactggcgagaaagaaaaactacttaataagttagatgaattgagtcaaaatatgcctgtgtttttcagcgcgaacatgagttatggcgttcatgcattgactaaaattttagcagctgctgttcccctacttgatgatttcgacatcgaattgactgaggcacatcataataaaaaagtagatgcaccaagtggtacgttagaaaaattgtatgatgtgatcgtatctttgaaagaaaatgtaacacctgtgtatgatagacatgaattaaatgaaaaacgccagccacaagatattggtatacattctattcgtggaggtacgattgtcggtgaacatgaagttctatttgctggcactgatgaaacgattcaaatcacgcatcgtgcacaatcaaaagatatttttgcgaatggtgcaatacaagcagcagaacgcttagttaataaaccaaacggcttttatacgtttgacaacttataaacatattaaaggagatcgattattttatggtacaacatttaacagctgaagaaattattcaatatataagtgatgctaaaaagtctacaccaataaaagtatatttaaatggtaattttgaaggcatcacatatccagaaagttttaaagtatttggttcagaacaatctaaagtaatcttttgtgaagcggatgattggaaacctttttacgaagcatatggtagtcaattcgaagatatagaaattgaaatggatcgtcgcaattctgctattccattaaaagacttaacaaatacgaatgcacgaattgaaccaggtgcgtttattagagaacaagccattattgaagatggtgctgtcgttatgatgggcgcaacaattaatattggcgcagtcgttggcgaaggtacaatgattgatatgaatgctactctcggtggtcgtgctacaactggtaaaaatgtacatgtaggggctggcgcagtattagcaggtgtgattgaaccccctagtgcttcaccggttataatcgaggatgatgtattaatcggtgcaaatgcagttattttagaaggtgtacgtgttggtaaaggtgctattgttgcagctggcgcgattgtgacacaagatgtaccagctggtgcagttgttgctggtacacctgcaaaagtgattaagcaagcttctgaagtacaagatactaaaaaagagattgtagcagcattaagaaaactgaatgactagtgacgtcaacgtataataatttcaaggttgagatacgattatgtctcaaccttattgtttagcattgaataaacttatgatcacaaatttcgaaatacgttacactatttatatagtaatttaacacaaaggattgataattatgaatgaattagaatttgttacgaaacatcgccgtcatttacatcaacatcctgaattaagcttacatgaatttgaaacaactgcttatattaaagcgtttttagatagtttaaatattaaatacgattgcccattggaaactggcgtcattgcatacttagaaggtaatggctcacatacgatagcgtatagagctgatattgatgcgttacctattttagaggaaaatgatgtgccttatcgcagtcaatctgatcatgtgatgcatgcttgtggacatgatggtcatacaactgcattaatgctttttgtacaacgttgcaaagacatgcaagatgcaggtcaattaccgcaaaatgtcgttttcattttccaacctgcagaagaaactggtggcggtgcaaatcgattaataaaagccggtgcctttgataagtatccaattgaagcggtatttggtattcatgttaacccatttgctgatgaaggcattgcagtgataagagatgaagaaattacggccagcgcaacagagtatcgctttttcttaacaggcctgtcaagtcatgttgctgataaagaacaaggtcattcttgtggtgaagcattacaacatgtattaactcaaatatcacaaattcaacaatttcaccttaacggtttgaaacgaaatattgttcatattggtcattttaaagctggtgaagcgattaacactgtaccaagtaatggctatttagaaggtactattcgtacatatgatattgatgatttaacaatcgttaaaaatcaaatgcacaagatagcagaaagtgtcaagcttctgtttaatgtagattgtgaagttaaatttgcagaaggttatccccctacaatcaatagtccgaaattacgtactcaaatagaggacgccttaataaaagctgatttaaatgtctatgacaaaccaacgccattcttatttggggaagattttagtttttatggtcaacaactagctccagcttactttgtttttataggaacacgaaatgaagataaaggttttgtaactggtttgcacacatcacatttaaattttgatgaaaaagtgttaataaacgtggttaatttttacgaaaatttattaaataattacaaagaggtgtaatacattgacagcaacatggtctgtaaataagaaaatatttttacaaaatgcaatcacagtcaaaaacaatcagccattaatggcagttgttaaaaataatgcatatcactatgacctagaatttgctgtaactcagtttatccatgcaggtatagatacatttagcacaacatcactacgagaagcaattcaaattagacaacttgctccagatgcaacaatctttttaatgaatgcagtttacgagtttgatttagtccgtgaacatcaaatacatatgactttgccgtcgttgacatattactataaccataaaaatgatttagctggtattcatgttcacttagaatttgaaaatttattacatcggtctggatttaaagatttaaacgaaattaaagaagtattgaaagatcaccatcataatcaaaatgcaaaaatgattattagtggtttatggacccattttggatatgctgatgaattcgatgtgtcagattataatgttgaacgttcacaatggatggaaattgttgaagcacttttatctgaaggttatcagttcgacctaatccatgctcaaaatagtgcgagtttttatcgggaaggacaaatattactaccccaccatacacatgcgcgtgtaggtattgcgttatacggttcaagaccatatagttcactgaatcaacatgatatagttcagtcattaactttaaaagcacatgttattcaagtgcgcgaagtacaagctggtgattattgcggttatagctttgcctttgaagtgactaaaaacaatacaaaattagctgtagttgatatcggttatggcgatggaattttaagaactcgtgctaaacatgaagcacttatcaatggtaaacgctacccgatacgtgcattaatgatgagccatatgtttgttgaagtagatggcaatgtacatgcacaagatgaagttattctttataataatgatatccgcatcgatgaatatacctttaaaggtgttggtgcaaattctgaacaattaagtgctatgaatcatgattctttaaaaaaggagtacatttcaaatgactgttaaatataatcaaaatggcgaattaacaatggatggtattagtttaaaaacgattgcacaaagctttggtacacctaccattgtttatgatgaactacaaattagagaacagatgcgccgttaccatcgcgcatttaaagatagtggattaaaatacaatatttcatacgcctcaaaggcatttacttgcattcaaatggtcaaacttgtagctgaggaagatttacagttagatgttgtttctgaaggtgaattatatacagctttagaagcaggttttgaaccgagtcgcatccatttccatggtaacaataaaacgaaacatgaaattaggtatgctttagaaaataatatcggttattttgttatagattcattagaagaaattgaattaatagaccgctatgctaatgatacggttcaagttgtattacgagttaatccaggtgttgaagcacatacacacgaatttattcaaactgggcaagaagatagtaagtttggattatcaattcaatatggcttagctaaaaaagcaattgacaaagtccaacaatctaaacacttaaaattaaaaggtgtacattgtcatattggttcacagattgaaggtacagaagcatttattgaaactgctaaaattgttttacgttggcttaaagagcaaggcattcaagttgaattattaaaccttggtggtggctttggtattaaatatgttgaaggtgacgaaagtttccctatcgaaagtggtattaaagatattacagacgcaataaaatccgaaattaaagttctaggtatagatgcaccagaaataggtattgaaccgggacgatcaattgtaggtgaagctggcgttactttatatgaagttggaaccattaaagaaattccagagattaataaatatgtttcaatcgatggcggtatgagtgatcatatcagaactgcactttatgacgcaaagtatcaagcattgcttgttaatagaaatgaagaagcagatgacagtgtaactatagctggaaaattatgtgagtctggtgatatcattattaaagacgctaaattaccttcatcagtcaaacgtggagactatcttgctatattatcaactggtgcatatcattactctatggcatccaattacaatcaaatgcaaaagccttctgtgtttttcttaaaagatggcaaagcacgtgaagttataaagcgacaatcgttaagacaactcattattaatgatacaaaataaaaataaacaaagtaatccccgaagcacagaaaattatactgtgactcggggaatttttatgcattatagatgactgtagaaaacatgcttggacatatactctaaaaaaggaagaacagcacatttttagttagaaagtatttatttctttttgtcattaatcctttatatttagttagccctattcaactaatttaaagcatcatatacataccacactttaaacaagcatcatgaaattagattttatgctttacttgctttttcaaataatataaaacgataagaattaacaacaaatataatgtataaaacagaatttcatcaaatccaaaatctttacttgtaattaatacatcaatatcttctaattccatcatctctgctttaatataattattaaactttggcaaagtcattaaatgtacattgtaaatatagtaataaaagtcgataaatatgatgttaaaaaatatgtatgttttatcaatattagttttgaaaaatagtatcccagaaatcattatcggaatcactaatacaatcatcattgctgctaaaatattaatatttaatccaattgcagataatacaccgaaaactaataaattagcaactaaactaaggataagatatttcataaaatcacctcgtcgttgtacaccataattatattatataaatatatttttctattgcaaacaatgttggtgatataaaaaaagagttctcaatttggttgagaaactcatcgcgttaagtatttgtaataagcatataaaaacaccttacttcttggtaaggtgttagttaaaatcaatgattcaaatctaagaattatagtttaacaacgtttgcagcttgtggaccgcggtcgccttcaactacttcaaactcaacagcttgaccttcttctaatgatttgtaaccatcttggttaattgctgaaaaatgtacgaatacgtcattttctccttcaacttcgataaagccgaatcctttttcagcgttaaaccatttaactgtaccttgtttcataatctgaaacctccaagactaaaattcattcaatatgcttattcgcatattacaaaaaatacatgcaaatttcactcaaatattctttgcaatatggaataatcatctgcttaacttgtattatagtgcagttattaccaaattgcaatacaataataaaaaatattcatttaatcaattattggtagtttataatatacttcattattttgtaaaacaatgaaactataaaatatttgtaaatcctcttcacaatcttcgcaatagttcatgtcacaattattataaaatgcataaatattatatttgcctgtgacatagttatcgaactgaactttacattgattaatcaattgttgatagtgcttaaacatgtcatcaaaatcttgatattgatatttttcaacaatgttttctggccagtcactgaataaccaccatccctcataatcggctctaattttggtaactgtccacattattaaagaccccttccatacttcaaaaactctatacttatttttatacctttatcctctgaaaatcaagtttgacgacttgaaacaaacaaagtagtaactatagtaattattagtttttttaagtaaaactacgtataataacattatgaggtggtaaaaatgagacatatacatttacaagtattcggacgcgttcaaggcgtcggatttagatattttacacaacgcattgcaatgaactataacattgtcggtactgttcaaaatgtagatgactatgtagagatatatgcacaaggggatgacgcagatatagagagatttattcaaggtgtaattgaaggtgcctcaccagcatcaaatgtaacaagccatcaacttgaagagttagaactaaatcaaaaattatcggattttcgatcaatataaaatgctaaataaaggaagatgacagtgagatataatatttctcatatatttggggtgttagtgggaattcctgtagcgtttttaacaagcatatttgggatgattgcacttgatgtatcttttttaattgatatgtctattggtattgttggctttttaatgacatacctaccgatacaaaaactcacttcacgcaaatatttaaacgaaattggtttgactagaaaagactatcgctatattcgaaatcagttaaatcatacacaccaaaaacttagaggtattttaaaaacgtatgtcaatataagatcaattaaagattttaggcagattaatgatatataccaaatttcacgttctatttatacgacagttagacagagacctgcatcattttataaagttgaaggctttttttattctcatattgataatgctttaaatttggttgatgcatatacacgtctagcaaaaatgcccaaaaaatcaattaatgaacagcaaaagttagaacaaacacgaattactttggatgaggtcaaacgaacattaatcgctgatttaaagcgtctcaacgaagatgattatgaacgtttagatattgaaatggaattaaataagttacatcaaaaacatcatcaagattgatgtaaaatagcaactattggagagatgattgatgactgaaaataaaagtttcaaagaaagccatccactagatgattttataagcgataaagaattatcgaatactactattcaaaaagaaaagttaacaattgaacaacaaaaacaggtagacacaatcagtaaacaaattaaccctttagacaatgaaggtttattagcgtttggttctgatttacagaaacaaatgtctcaattttcacatcaaatgttggatgaagtacaaagtaaagatgttggtcctattggagatactttgtcagatctaatgtcaaaactaaagtcagttaatccaaatgagttaaatactgataaaccatctatgttaaaaagaatttttagcagagcaaagtcgtctatcaatgaaatcttttcaagaatgcaatcagttagtgctcaagtcgatcgcataacgattcaactgcagaaacatcaaacacatttaacaagagatattgaattattagatacgctatatgataaaaacaaacaatactttgatgacttatcattgcatatcattgctgcacagcaaaaaaagttgcaattagaaaatgaaaagctaccacaattgcaacagcaagcgcagcaatccactaatcaaatggatattcaacaagttgcagatatgcagcaatttatagatagactagataaacgcatatatgacttacagctttcaagacaaatagctttgcaaactgcgccacaaattcgtatgattcaaaatgttaatcaagcacttgccgagaagatacaaagttcaattttgacaagtattccactatggaaaaatcaaatggccattgcgcttacattaatgagacagcgtaatgcagttgctgcacaacgagctgtcactgatacaactaatgatttattaacagcaaatgctgaaatgttgaaacaaaatgcgattgaaactgcaacagaaaatgagcgtggcattgttgatcttgatacattgaaacgtacacagcgtaacattattgagacaattgaagaaacattaattattcaacaacacggtcgcgaagaacgacaattagctgaaaaagaattacaacaattagaacaagatttaaagtcacatttagtgaacatcaaaggaccgaataaacaatcataaattacgaattagatataacaaaaaagagcttgggacattaagttccttaaagttcttaggcaatgtaaaaaagctgatttctattatttatttgatagaaatcagcttttttgatatgtattttataatgtacagctcgttgagctgctattttccttatattaagtgccattaatacaaaacctagctctcgtttaactttatttattcctcgaactgacattcgagtgaaacccaaaatagccttcataaatccaaaaacaggctctacatcaatttttctttgactatagattttttcgtttctggttcagaaagcttttgattaatttgggctttaaagtattcccaattataattcttcataattttcttattggatttcgaatttggcttcatgcattgatgtctcaaagaacatgatgaacagtcatcacattcatatagcttgaagtcacgtttaaaactatatctatcattacggtatgcatatcttttaaaacctattcttttgttattaggacatataaattcatcgaattcgctatcagatatcgtttcaacaatttcattaacatatcgcgtattatcattttgaggaattctaacagaagtttctattggtagtgtaagttgggtcatgttataatttttatacataaggcacctcgttaatttagtttagtagtatttattaaattatacgaagggatccaacacagaaaatttattttattgaattttacatttatgtgcaagttgggcaaagtgtcttatttttttaaagtatttcaaagtaaaattacacgttaatacgtagtattaatggcgagactcctgagggagcagtgccagtcgaagaccgaggctgagacggcaccctaggaaagcgaagccattcaatacgaagtattgtataaatagagaacagcagtaagatattttctaattgaaaattatcttactgctgtttttttagggatttatgtcccaacctcttttatattattcgttattcctgttgatatttaattggatcttgttttacaaatatgccgactagatagcctaatatcgttgcaataattgctactgggaaccactctaaagaatacgctcttagaggcaatgattctataaagttaattttcagccaacctaacttactaataacactgaaaatcgacaatataaatacgataataactggaatttgttgtgaaatgcgttttgtcggtatgaatttggcaattaaaattaataatacaacagttattgctactgggtatacaatgcttaataccggaattgacattgagataacagcatttaaaccttggttagcaataataaaactcattaaaatgaaaactaatacaaatgctttgtatgatactttaggtacgattctatggaaatattcagaaactgcaacaataagcccgcatgctgtagttagacatgccagcgccacaatgatgcccaataaatattttccgaatgaaccaaatcctgttgaagccattgtcgttaataaatatgtcccaatgtttcgatctttggatttcaattgatctaacgtcatgtcacttactggcatatgattaccaatataacctaatgaaatatatatgaaaattaaagctacggctgcaattaaaccagcagtcaaagtttgtttgaatatttgatttgttttagtaatgcctgttagttttactgcattaacaacaatcattgaaaaagcaattgctgcaatggcatccattgttaaatagccttgtgtaaagccttcagcaaaacttgaaaaattagaatgatatagtgcttcattgccctttccagcactattaccgctaaagtctaagtatcctttaataatcatcgctaaaatagtaatcaataataatggtgttaataatgaaccaatacgatcgattaacttagatggatttaaacaaatatacaaaacgactatgaagtagataatcgtaaatataaataaagcgatactactattgctatgtataattggtgtaattgtcatttcaaaagatgtagatgcagttctaggtattgcaaaaagtggtcctatagtcaaataaatgatgattaagaacaatattgaaaatttaggtgaaattttatttaatgcgccaatatatccttctttatcaagtgcacctacaatcacacctaataatggtaaaccaatcccagttagaacaaacgctaaaatggcgggccagaaaaattgaccactatccaatccgagattaggaggaaaaattagattgcctgcgccaaaaaacatagcgaagagcgtaaacccaatgacccatgtatttttattcatagagttactcctttttttaaaacacgaaataatttacaagtaaatattttagcacaaaaaataataaagagtctatatgaaatatgttgtacatagcagaaacaaaacacatgtgttgtttaaatcaaattatgtcagaaaataaaattcttcaaatccactttttaaatagtaactgatgacttttattcacaatttcatataaactcatattttaaatttatttataaagatttaagtagtaatttttttaataatggagagagatgtccaggtaaatgcgcaacaccttcaacgaaaatagcatattgaccataaatattatgaattgtttgttcaacatcttcagttattggatcttgactcaaaaatacattaaatacttcaataccaaatttacgtgacatttctacagcttcatacgtatcaataataccatcttgactataattaaatgcagacggttcgccgtctgaaaatacgattaaaaatcgttgatgttgatttcgacgcattaatcgttcacttgcaactctaatagcaacaccatcacgattatcatcttgaggttcaagtgccataatacgtgggccatctttttcaaaggttgagtaatcatagttaataatttcattaatgatatttggttgtgcatgctcgtctgaatcaaaggcatcctcactgaatgataaaatttcatgtttaatgttcaatgcttttaacgtctcgtggaataacactacacctttcttcgtttcagccattttatcatgcatacttgctgacgcatcaattaacaatgtaaatgtcgcatcaaatgatttacttaaatcttgttttttgtaaaacaatttatattgatcgtcgataaaccaattaattaaatccttttgtaatcgcccttttgttaaattaaaacgtgcatctcgttgttctcgttcaatcgttttctttataatttgaattaagtctttgatttcatattgtacgtcttgtttcgattcttgatattctaaaacatattgtggctcaatttcaggaatttgccattttatttctacatttttgttcacaccatcaagttgaaatgcttggctttgaccaacagcatcgccttcttcacgatttagcgtatcgtttgatcctttgccctttttggtcatcatatcagtcatatcatctgtagcatcgccttcacgtgcttcatcattacctaatgtttcactattttgtccttcgtgaagctccatttctaaataggcgccaccttttgactcactatctgcagatttagagtcagctttttcactttcgttatcatcatcttctgaagtatcatcttgcccatcgacttgacttgcatcagttctctttaaatcatcaaactctggactagctaatgtattatatagtgttttaggtaagtaataatattcgtttagcatatcttcttttaaaatatcatctacttgatacataattctttgagccagatacatattatcttcagaattttgattttggaaaaaattaggtaaatataagaacatatttactaaaatatcatctaaatctgaatgtatagatggtatatcaaagaaatcttggcttaaaaatgcatgttctaaatacaaaaataataaatctgtatattgtgttttagtacgatacactttaatttgagattccgtatatgatatacgtgtatctaagcgaagatcaattaatttagcagtacttgggcgctcaactttaatagaatttaatacgcgcatatcttctaataatttaaaaagttgttgataaaatttagggtgtttaaaagttttatcttgtactacttcatttacaatttgtacatccatcatatgataaccgtaagcagctaacataacatctgtttttaaaccagccatttcgatatggcttggtcgatgtgaccaaaaccaactcgtaatcaaaacattttgaacaggattatagtaagggaatttttggattttaacttgtgtttgttcattttttaataagagtcgagctaagtcttgcaacatcattacttgcttggcatctaactgttcgtcattaaattttatgaaacgatcactcatgttttatccctctttaaaagtttagttctacagcattatatattgcttgttgttcacgttcatcttccaatttatcaataattgtacgtttaattgcacgttcaactggcattacagtgattaaatcacacaagtctaataatgcacggatactagcggcttcttcagaaatttgtccctgcttagacatagtacgtaaatcttcattaaacttaataatttgttcgatttgtttatcatcttgtaataaactttgctctttaatcacattttttaaaatgtccccatcaatataatcaacgtgaataacaacaaagcgattttttagtgcttcattcattggcaaagtaccaacataaccttcatttatcgctgctataacgttaaatcctggtacagctttgattacttcaccagtgtatggattcgtaatttgacgacgataatctaagaccccatttaatacaggcaatgtttcaggtttagccatatttatttcatcaatatataaaatatgcccctctttcatagctttaataactggaccatctacaaagacaatttcttgttgaccttccgcatttgttttaattgttttaaagcctaataagctttctgtatctaaatcaacagaacaattgacttgatgcatgggtgtatcaacaacttcacttaatgtttctgccaactttgttttccctgaacctgttggacctttaagtaaaatatttttatttaaatcaaataatgccttcgcatcattgaaaactgttgaatctgaattcttataatgttttagtgccattttaaaacgttctcctttaaataaattaaaaaactaagacatggaataagttctccaaatgccttagtttactattctattctgatataaaacgcaatgcttagtatgcgaattgtttatattttaccaaatttactaattgaaaatctcatattaggcttcatttcaataattatgcgtttaaacttctttgaaatatgttttatagtaaccgccaactaatccagaattatctattatttgataatattcttcagtttcgttgataacatcatattgtttgccaaccgttaacatgtcagaaactgtaaatttctttgcatctgtattaatgacttctactttcttgattggtgtacgttctttccaagtttcatgtaacataaattttgtcctcgctatcgtaaaaaaattatttttgtaaagtgaatataaacgataatccactgttttcagtaattctaattgattcaatatcatcttgctcaagcgtttgatatggtatttccacttcatctaagcgcgatttcgcttgattaaagaaatctgcatctttcgtttcaaactcaacttgatcgactgcgccatattccggcattgtcatttcggtttctacaggcattaaatgtatttcgccacctagaccacccgttccaactttgaatacttggacatgatagtcagcattgtcgaagggttggtattctgcaaatacttcaagtccgaatatatttgttaaaatttgacctgtaatatctacatgattcactttaagaatcactggtcctaaaccttgcacttgatgtaacggattgaccgcactctcaaaagaaggcatacctaaaccaacgccataattattctcgtttgaatatattgagaaaatatgaccattgttatcttcgagactgaaatatttattgccatttaattctttaactgttgtaaatggaatatccttattcgataatatttccgcatactcctctaaacctgagtcagttggtgtacgtaatccaatacccacaaagtgagattcttctaattgctcacttggaacttgtataaattgaagtcttgttcctgggcttatatctgcatcgccgaaacgaattgagttttcaagaagttcttcataatttaatcctaatatgtcaaccatgaaatgttttgtctgttctatatttgttgtacctaatgttatacttctaagtccacacattatagccacctctatctttatctttactattatattataacttattttaatcataaattatagaatatcggtcagttgattttgattatagattaatatgtgaaaaatgtatttctttaaaagaactatttcatttaaataggtaacataatattgttatggttgctattgagtgtgtcattaatgaatatctgtatatagcaattgaatatttcgttttttgtaggacatgaaaaacatatatatgtcgtgtccataaagcgaatttacatcatgttcagatgattttaaattaactaaaggcgcttatagaattcatatatttcatcgtttgttattatctaaaatgcattcattagcatattgaaacacgctattctacctatatttctattgtgagtctatttcaatagaaatgatatattttttaagtagtcaaaattaaacccacattttaatacgaatcattataaaaataaagtacagcagtaagatatttcgactaggaaataatcttactgctgtttgttattgatttaatcccgcttttaggaatagtaaactattttgtgttgtggattaagattctaataataagtcttctgggttttcaattaattctttaattgtttttaagaatccaactgcttctttaccgtcaataattctatgatcatagcttaatgcaatatacatcattggacgattttcgattgtatcttgatcaatcgcaattggtcttgtaataattgaatgcatgcctaagattgcagcttgattaccattgataattggcgtactcatcattgatccaaaaataccgccatttgtaatcgtaaatgaaccattaaccatatcatctaagccaagttttttctctcgtgctttaactgctaaattagcaatttctgcttcgatttctgcaaaattctttttatcacaatctcttacaaatggtactaataatccatcatctgtagaaacagctacaccaatatcataatattgtttcgtaatcatgtcgtcgccgtcgatttctgcattaacttctggatactttttcaaagctgctacagaagctttagtaaagaatgacataaatcctaatttagtaccatcatgatctttcataaattgttctttcttacgtttacgcaattccataacatttgtcatgtcaacttcgttaaatgttgttaacatagctgtattattagatacctctaataattttttggcagctgttttctttctacgtgacattttttcacgaatcactggttttgtaggatattgattgtattttttctcttcttttgcagatgcttgttgtgttgtttgtgttgatgccggtgcctgttgtttcttatcaatatcttctttacgaaccacatcatttgttttcggacttacttcagcaagattcacaccattttcacgagcatatcgacgcgcagaaggcgtagcattaatacgttgctgattgtcatcatttgcttgatttacttcagctttatctaccgaattatttgttgtttcttcttttttattatttgtttcttcattttgttgtggagtattgtcgttactattttctttagaagcattgccactaccttcgccgatgatagcaattgcttgtccaacttctacagtgtcgccttcacttgcaagttgttcagataatacacctgcttcttcagatacaacttcgacattaactttatcagtttctaattcaagaatagcttcacctttttctacgctatcccctacgtttttcaaccattctgcaatggtaccttctgtaatagattctgctaattctggaactttaacctctggcatgacttatttccccctagttattttttaatgcattttctataattttattttgaacaagtttatgaatttctccatcgccttcagctggagcagccctttgaattctgccatgataacttaaatcatatttatctgcaactagcactttaacatatggatagacatataaccatgcaccttgatttttaggttcttcttgtacccatgacacttcttcaaggtttggcaattgtgctagtaatgcttcaatctcttcctctgggaatggatacaatctttcaatcgcaacgagtaatactgattcgtctggatttttagctaatgcttcttttaaatcaatgaacattttaccagttgccaaaataacttttgtaaccttatccgcttgatatgattctgtcaaaattggctcaaatccaccagaagtaaattcatcaattggttttgcaactgttttatttctcagtaagctttttggtgacataacaaccaatggtcgcatttgttcagaatctaaactagccgcttgtgcacgcaataagtggaaataattacttgaactagataagttgacaactgtgcaattattttcagcagctaattgtaaaaatcgctctaatcttgctgatgaatgttcaggcccttgaccctcatatgcatgaggtaagaataatgttaatcctgaacgttctccccattttgagcgagaactgaataagaagttgtcaaaaatcatttgtgacatatttgcaaaatcaccatattgtgcttcccaaatattgaagctttttttgttttccacattatagccgtattcaaaaccaactactgctgcttctgaaagcggagaattgtgtatatcaaatgtcgctttttgatcaggaacatgatgtaaaggtgtatatgtttcacctgtttgctcatcatgtaacacggcatgcctatgactgaatgtaccacgttcactatcttgaccagttaagcgaatcggtgtaccatcttgtaaaattgtcgcaaatgcaagttgttctgcttgtgcccaatcaactaaaccatcttctttattaaacggctcatgacgcttctcaagaactttgtttaactttttcaaaatgttaaagccatccggatatgttaacaatgcatcatttatttctttcaagtgatcaaaagtaaatgattgttcgtctgcttgtaacggtaatgcaagatctgcaggcttttccatatctggattatccattttatcagctttattaattttatcatgagcttgtcttagttccttttggacttgttctataaatgaatgcatttcatcttctgaaatgacaccttcattaacaagctttttaccaaacacatattcaacagagtcatgtttgcgaatattctgataaggaactggattagtaattgatggttcatccatttcgttatgtccgaaacgacgataacctactaaatcaataacgacgtctttatgaaactcttttctaaattccattgcaatatcaattgcttcaatagtagcttcaacgtcatctgcattgacatggaatattggcacatcataacctttggccacatctgtagaataagttgttgaacgtgcatcaattggttctgtagtaaatccaattctattgttagtaataatatgcaatgaaccacccgtagaatagcctttcaagtttcctaagttcattgtttcgaagttaattccttgaccaggataagcagcatcgccatgtataataattggcattgctttatgatgatcagtcgtcggagccccagctcgttgtgtatcatcttgtgctgctctcgtacgcccctcaacaacaggtgcaacaatttccaagtgacttggattgttagccagtgcaatacgctgcattgtaccgtatgaatcagtagttttaatgccaccaaggtgatatttcacatcaccagtccatccagcagttaactgcaagctaccatcttcaggtaagaatttcattggatctgtatgcataaattctgaaatcatcatttcgtacggtttttctaagacatgcgttaaaacgtttaaacgtccacggtgagccatgcctatttgtatatttttaataccttctttcgcagcaatcgtaatagtacgttgtaacatcggtacaagtgcgtctaccccttcaattgaaaaacgctttgcaccaacgaagtttttatgaagatatttttcaaacccttcaacatacgctaattgtttgaatagtgcccttttttcgttattatttaacgttactttatatggcgtttcaattcttctttttaaccaaccacgttcggtattgttattaatatgtgtatactcaaatgcaattggtcctttgtaacgtttttccattcttaaaattgcttcataagcattatcataaatgtcggcaaagtgatctgaaacaattcctgctgatataccttccaaagtctgttgatctaaatcaaagtcttcaatctctaatttaggtacatgtttcctttttggaggatttacaggataaatatcggctttaagatgcccgtattggcgaatattatcaattaaacgcatgacacgcttaattgtgccgtcgctattttgactacttgtactttttaaagctggtacaattgagtcatcattcttaattgtgctgaataagacttgtaaatcttctggtacagatgatggatcttgtaaaaagtcatcatatagatctaacattagacctaaattcgcaccgaagtttacaggagcctctgaaacttcttttctttcgttagtcattttacaccctccacaaaaatgttgaaacgcttacaatgtaataatatcactatttagttatttgttaaagtagatttacctatttatctgctaaaaagaagaatcaacaaaagcgttgattcttctaggtttatagatgtattttattgtaaattttgggagtacaacagaaatgataaagaaccactgtttatttgttttatagttgttcttatacattagtcacagctaatgtgtacttaaaaaattgatcctatgactttgattgacgtctcagtcatgattaaaatatgattttaaacgttgttcctttgttaatttcacttttaattttaatcgatcctccgtttaattgaatgattttttgagcaatagataatccgagtccattaccgccttgacttcttgaacgagatttatccactcgataaaagcgatcaaaaatgaaatcttgatcttcctctggaataccaattccatgatctgtaatttcaattattttttgcttattttttaaccttgtcttaactttaattttcttattcttcacatcatatttgattgcattatcaataaagattaaaaataattgttcgaattgatgaggtttcattttaatttctagatttttagatgtcagatccgtatcaaattgataatcaggatgcaattgttttaatgagtgtattcgcgagcgaatttcatcattaatatgcacggtctgtgcttcagaagaaatgtcatttacatctcctttagtcaattcaagtaattcttcgactaattttatgatacgattcatttcttcaatagaaatatttaacgattcttctaatactgctgggtctttttttccccatcgctgaatcaaatttaaatgaccttgaataatttgtaatggtgttcgtaattcatgtgacgcatcttcaacaaattgtctttgttgattaaatgattcttcaatttggctcatcatctcattaaacgtatttgctaaattatctatttcttcataatttgtatttaattgcaatttattttgaaaaccatctcgtcgaatctcaatcattttatttgataaactgacaagcggtttagtaatttgtgttgaaaatacataactgattgtggcagttataattgttgcaatcactccaaatgccagcgcaatgatatacaatgattttacgatgttatcataattttctagtgaatgaattaacaagctataccctttgaaatcttgcgttgtaattggttctttaataattaaatattcaatgcctttatagcgtttttttattacgcggtcaaaataacggtgttcataacctggttcaactctcactgtgttatcattcgatgtctcaaataatttattattatgctcatcataaataattatctcttgaaaattacctaaagatgcattcaagtctaatgcagatatatctttaacaggcttagaatgaaataaattattaatatcgcttgagcttcgttctgcatcatcaagctcactattatgcagtgtatctttcaagaaaaaaataataattaaacaaaacaaaaatatcgtgacaaacgtaatcatcgtggtaacaataatccagttattgcgcaatttacgttttgtcatcgtatcacatacccaacgccacgaactgtttcaatcattttgtcacgatcgtatggttttaacttgtttcgtaaatatcttatataaacatctacgacatttgtttctacttcactattataaccccatacatgatttaaaatttgttcccgttgcataacatggtttttattttcagctagaagatatagtaaatcatactctgtttttgttaattcaatttctgcgccatttaccgtcactttaaaagcgttcttatcaattgtaataccgttgacatcgataatatccttttgtggctgacgacgtaaaattgcacgaattcttgctaaaagttcttcaatatcaaacggcttaactatataatcgtctgcaccgtaatcaagcccagcaactttgtcatacgtatcacttttcgctgtaattataatgataggtgtagattgttgttgtctaattttgcgacaaatttctaagccattaattgacggcaacattaaatctaatatgattaaatcatagtaatggctaagcgctttatctaaaccgtcttgtccatcatactctgtgtccacattgtaattttcatgtgtgagttccaattcaagaaatcttgctaagttttgttcatcttctactattaaaatttgcgtcatttgtacacctcatattacgactttttctaataaggtaatatattttaaattttgtatttttctatacaatagttgctttttaaattagtttgtttacgtttaaattttatcacaaatcaataaccatgttttaaatttttcaagctacaatcattaattatttattaactcaaatatttaataatcagttaatggcattctgttaattctgattgcagtacttaaatatagaatactgtaacacaaggccttaccgcaatattaattgttgtcatatactgacttttcactattgtaaaatgaatagttattatctttattttcacaaaatgaccgtagtttaaacatttcacacatcatttcaatgtgcgattttgaacttggaagtaacatttcataatgtatgaattcaaaaggagtatgtaaacaatataatgtttaaacctcatcacttttaaatattctaattctaatgagaaatacaaatttttttattttctaaaatagcgtaatcatgcgttttatttactattcttaaaaaatattcaaaaaaagttttagtttctaattgacaatgattctcactaatgtataatagtagttgaaaatgattatcaataccacatagaacatcccccccacaacgtttcgttcttgttggattggtcattttcaaatattccccttttatatgcccgtaaaagacaatatacgttataacaacgttttataaaagcagtaaacccttacgacactttaggtttactgcttttgttttttgtaaaaagaaaaccatacgctatgcgtatggttcagaaaaggttctaccattgtcacaaaaaatgcatctctacgtgctagaataaatattggtcagccaaccaaaataatcaacacgaggagatgctatttaatgtcatctgacacaaacagtttagcacatacaaaatggaattgtaagtatcatattgtctttgcacctaaatacagaagacaagtgatatatggaaaaataaaaaaagatatagggattatattgcgtcaattatgtgaaagaaaaggtgtagagataattgaagcagaggcatgtaaagatcatatccatatgttagttagtataccacccaaacttggggtatcatcatttgttggctatttaaaaggaaaaagtagtttaatgatatttgatagacatgctaacttaaagtatagatatggaaatagaaagttttggtgtaaaggattttatgtggatacagtaggtagaaataaaaaagtgattgaaaattatattcgtaatcaattacaagaggatatcgttgcagaccaaatctcaatggaagaatatttagatcctttcactggagagaaaaataaaaaaagaaagaaaaaagagtaaccctttagggttgctggaatagtagtgcagttggctgacttgtcagtgcccttttagggctggccagtaaggaaggcttatagccgcagaacaaaccacccgttcacacgggtggttttgattttactatttaatttattaatttatttctaagtaataacgttgataaaataatgcaaaataatccaccaataatgccggcaataatatctgttggataatgtacacctagatatacacgtgatatggaaatcaataaaatcatagctgcacataaccctataagaataccttttgaattaccttgatttaatcgatttaatagatagataccacttccaaaatatgcagttgatcccatagcatgaccgctaggaaaactaaatcctgttatatcaattaaacgcagcaatgtaggtctttctctatcgaatatattttttaatgctggattcaaaattccagataatgccattgttaatgcaaaaaataatgcttcaattttgtggcgctttaacatgagatatgccacaagaagtaatgaaatacataacattgcccagacttcacctactttagtagccccaagcatgatagatgtcgtaataaagctctctgatgaatatacaaactcataaacttcattatcaatccatttcccaagtcttgattcgtggaaaaacgcgataattccaaaaaccaatgtaaaaacgatgagcaaagagatacgtttccattgactcataaagcattaccccccattaattcaatgcgtctttaatcatcttatcaaataaagcttctttcgtataactttgttcatacgatttcatattattgataattcgagttctttcctgttccatttcatttagttcttgtaataaaatttgtgctgttaattgttcttcatcaatcgctttagcatatcctttatcagcaaaatgatttgcattgtcaatttggtcgcctcgggattgatctaaacctaatggtactaataacattggtatacgtaatgttaagaactcataaatcgcatttgatccagctctacttattactgtatccgtaattgctaataaatctgttaaatcctctttaacaaattcatattgtatatatcctgattttttaacttgagcatcttttaatcctttaccagttaaatgtatcacttgatattgttgtaataatgcatctaagttttcgcgaataatgctatttaattttttacttcctaagcttccacccataacgagtaaaacttttttattttcattaaagcctgttaattgataaccattatgtgcattaccattttttaaatcttctcgaattgttgctccaataaaatcagctttctctttaggtaagtagtttagcgtttcttcaaatgttgtatatattttcttggcaaatttaagtgctatcttattcgctaatcctggtgttaagtcagattcatgaataatagttggtatatttaatgatttggctgcaataacaacaggcacagatacaaatccaccttttgaaaataatagatcaggtttttcttttttcaaaactttacgagcatcaagaatacctttcaatactttaaatacgtctttggcattttctaaagaaatatatcttcttaatttaccactcgaaataggataatacttaatttctggtagttgtgattcaatcatttctctttcaataccatttttagaaccaatataaagcgcttcataaccttgtgataatgcagttggaattaaacttaaatttactgatacgtgtccaactgttccccctccggtaaatgcgattttcgtcattaatattacctctattcttttaaatttttataatatgcataaaatggttcacctttatcatatggcggatattccattaattgttcaccgaccttatgaaatccaaatttggcaaataaaccttgtgcaggtttgtttaacgcaaaggtgtccgttaaaataacttctgcaccacgtgctttaactacatcaataacataattgaataattctgtagcagctcctttatattctttcgaaccagttaatcgatgaataacaaaggcgccttctctatttactggccagtcaatgtcatcataccattctgcttggtcttggtcgacaacaataaagccataaattttgtcattttcctctaatacgtacaaataatctttagcaatatcttcttcaaaatgttctaaaagtgggtactgatcgtcccattgctcgttgtcgtgttctttcattaattcttttgcttcttctactagatttaagatttgatctaaatctgacattttacctagacggatcatgtacgtcactccttatatcattatgttaaacatgtttttcagtacatgttaatcttacacactattaacatgctttaaacctttattatgaatgaaaaatagtaattatcacactatgggataaaaataaccaataaaagtatcatataccaattaattgattgttaaaactagtgaataatactatttaaaaagtatatgctcattgcatattaaaccatgaattgttatcagcgatgatagaaattgcgttatttacatcatttgtaaatgtctaatttatatcttttagagttagacgtcaataaaaataaacacgcctcctaaattgctatctttgcaaatttaggaggcgtgtcattaacataataataatacaattttagtagtgtgtatcgcttattttaaaatattaatcaacttatcgagaacatcatcatgtttattagctttttcaactaataactcagtaaatttattattcgtttctttattaaattcaccagttacctcaagtttattcgcttgttggaaagctttaacttgattttctaaagctttatcaaattgcgttgattcattatcaactttataacctaaagctgataaaccaattttaatagttttaatatttttatcatcgtctccaactttaaatgttttcgtattaggaatgacatttaaagattgatatttaggtgtgtcaatagtaacgtctggtttaatgcctttaccgtgaatataatgaccatctggcgttaaccatttcatttcagtatattttaacaatgaaccatccttaaactctcttgtagtttgtacgacacctttgccgaatgtttttgacccataaactttagctttattatagtcttttagcgcaccagtaaacacttcagaagcgctagctgaaccttcattcactaagatggatatatccatgtctttcgcttcttttaacgcatcattagaagtttgaattgcttcagtatctttacctttttctagtttaacaacagtttttcctttatcgataaaaatatttgccattttaacagcttcatctagtagtccacctggattatttcttaaatctaaaacaatctttttcaaaccatctttgtgagcttttagaactgcatctttcaattcacctgatgtatcattctggaatttattaatagtaataactccaactttaccttttttcttatactcaacacttttaacatgaattttttcacgtttaatcttaacgtctttttcttcactacctcgttgaacagttaaagtgacttcagtgttttctttaccacgaacatctttgacaacttcatctaatgctttacctttaattgattttccatttactttagtaatgacatctttaggacgaatgccagcacgttctgctggagatcccttcataggactagtaaccataatttgatcatttttcttttgcatttctgcaccaatacctacaaaatcacctgaaacaccttcattaaaggatttcgtttgttcttttgttaaatattcagaataaggatcttttaattctttgaccatgccatcaattgcagctttacttaacttgtcagagtcctgttttttgtaataatcactatttaagattttatacacattttcaattttatttaagtttgcttgatcagttttgtttaaaccacttattttttgatttataaaaatatatgcaacaactgtgatgacagctgttattaggattgtaccaattaatattgatatgaattgccaacgttttaagtgaacgcgtttcgatgaattagtttcttggtcttgattgcttgttgcaatttcagcgcgttcatcatcggatgaagatgtgtgttgcttatcatccattgtatcacttccttattatgtattatgtacttttaaattctgtgtagttaatcatatcaatttatgcaagatagcgcaccatatttcactataattgattaatttttagtcacaacttagtttattttaaattaaaaccaggataacgaattgcatcaccctggttctaactattattattaaaaattatattaaaattttagccattccgtatattcttcatataaatcatcaaatacagacattggcaatgtgaaatcaccatgtgtctcaatataatcagacagtatgttaaaatcatcatcgtgttttgggaaagcaagatcgtcaaatatctcttctgctagacgagctttatcgtcgtgtcgaccacgaactgtcatgacaaattgataaaacgaatagtttttcattagttcattgtcacatcaatcacttttgtttcacctttaatcacagcattttcatcataaatattaattgaagctgcttgatcagtgttagtaattataattggtgaaattacagatttagcgttattattaatatattcaaggttgaatcttactaatggatctccgacgttaacttcgtcaccactagacactaacacttcaaatccttcaccgtctaattgaactgtgtctaaaccgatatgaactaataattctaatccgttatctgcttttaacccaatcgcatgcttagttggaaagacattgtcaacacgtcctgcaattggagacacaacttctccttcagttggattaataccaaaaccttcgcccatcattttttgtgcgaatacaggatctggaatatcttcaattttcacgaattctccagttaatggtgcataaattgcgatatctttctgaacttctttgccttttccgaataattttttaaacatactttccactcctacttatcaaaatgtgatattaaatcgccataacccaattcttctaacttttcatatggaataaattgaattgcagcggaattgatacagtatcttaagccgccactttctttaggtccatcattaaagacatgtcctaaatgactatttgattcttctgaacgcacttcagttctcaacataccaaatgatttgtcgactaattctataatttcatcgtcatcaagcgctttggaaaagctaggccatccacattcagaatgaaacttttcttcagatgtaaataaaggtttaccagaaattttatctacataaattcctttagcaaaatgattccaatattcattcataaatggtggttcagtgccgttttcttgtgtaacaatatattctatatctgttagttcacttttatcttttttaagcattttgattcccccaatgtgattctataaacgcttttctacctgaaccacgttgatattggtaataatgtaccgggttctttttgtaataatcttgatggtagtcttcagctggatagaaatttttatatggtttaataggtgtaatcactggtttcttgaaaataccttgttcatttaattgttgctttttaaactcagcagcctttttctgatgttcatcatgatagaaaatgactggttgatagctttcgcctctatcgaaaaattgcccttga

SEQ ID NO: 10 - DNA, 2864125 bp, Staphylococcus aureus M1 (residues 1,432,064-2,864,125 of 2,864,125)
  misc_feature (508573)..(513989): n is a, c, g, or t
  misc_feature (552858)..(557968): n is a, c, g, or t
  misc_feature (1988135)..(1993109): n is a, c, g, or t
  misc_feature (2284554)..(2289626): n is a, c, g, or t
tcatcagttgggtcaaatgttttgaaatatatgtctaatatattttcaaaggaagtaacctctggatcaaacgtaatttgtactgcttcgacatggccggtttgattcgtacatacctgttcataagttgggttgtcaacatgaccgccactataaccagatacgactgacttgatgcctggatatgatgtaaatggtttaaccatgcaccagaaacatcctcctgctaatgttgcatattcttttgtcatatgaattacctcctctatctatctaattataaatttagtctataaaggattgaaatggaagtaattaacactgaaaagattaaatttacttcttaaggactacgaggccaatcgcaccttgaccagtatgtgcagaaataactggtgtagttacatttatatcgtaattattcacatgaaaagcttcattaaaaactttcttcaatttatcaacatattcaatgacgttagcatgtgcgacaccaatggatttgatttcatgatctcctataaattcagcaatttcctttttcaagtattggatactagaattttgagttctcgcattgtgcacaagctctaagcgaccatcatctagtgtaccaattggtttaattttcataagattaccaatcaaaccttttgttttactaattctgccacctttaattaattgattcaattgccctataactacaaataatttaatgttttctcttaaatgatttaactttttaactatttcagaagttgagacaccttcttttacaagctctactaggtgttgtatttgataccctaaaccaaaagaaatagattttgaatcaataacagttacattagcatctaccatttgacttgcttggtaagcagtgttatatgtaccacttaatcctgaagaaagatgaatacttatgatttcagagccatcttttcctagttcttcataagcagatataaattcacctatggctggctgacttgtctttacatcttcatcattttcaatatgattaataaattcttctgatgtaatatctacttggtcaacgtatgaagctccttcaatagttaaacttaaaggaattacatgaatgttgtttgcttctaagtattctttagataaatcggatgttgagtctgttactataatctgttttgtcatggtcgttttcccccttattttttacgaattaaatgtagaaaggtatgtggaattgtatttttctcatctagtttaccttcaactgaagaggcaacttcccagtcttcaaatgtataaggtggaaagaacgtatcaccacggaatttaccttcaataacagtaatatacatgtcgtccactttatcaatcatttcttcaaataatgtttgccctccaaatatgaaaacatggcccggtagttggtaaatatcttcaatagagtgaattacatcaacgccctctacgttgaaacttgtatctgaagtaagtacaacatttcgacgattcggtagtggtttaccaatcgattcaaatgtcttacgacccattactaaagtatgacctgttgataattttttaacatgcttcaaatcatttggtaggtgccaaggtaattgattttcaaaaccaattactcgttgcaagtcatgtgcaactagaatggataaagtcataattatcctccttcttctatcatttcattttttattactaagttatctttaatttaacacaatttttatcataaagtgtgatagaaataatgattttgcataatttatgaaaacgtttaacacaaaaaagtacttttttgcacttgaaaatactatgatgtcattttgatgtctatatggttagctaactatgcaatgactacactgctattggagcttttattgctggatgtgattcatagtcaacaatttccaaatcttcataatttatgtcgaaaatagacttgtcactgttaatttttaatgttggaggattgaagctttcacgtgctaattgtgtttgaatcgcatcaatatgatttgaataaatatgtgcatctccaaatgtatgcacaaattcacccacttcaagtccacattctttggcaataaggtgtgtcaataaagcgtagcttgcgatattaaatggcacacctaaaaagatatctgcgctacgttggtataactggcaacttaacttaccatcttggacataaaactggaacatggtatgacaaggcggaagtgccattgtatcaatttctgttggattccatgcagatacgatgtgtcgccttgaatctggattatgcttaatttgttcaattactgttttaagttgatcaaaatgattaccatctttatcaacccaatctcgccattgtttaccataaacatttcctaaatccccgaattgcttcgcaaatgtatcatcttcaagaatacgttgcttaaattgtttcatttgttctttatattgttcgttaaattcaggatcactcaatgcacgatgcccgaaatctgtcatatctggacctttatactcgtctgatttgatataattttcaaaagcccattcgttccatatattattattatattttaataagtattggatgtttgtatctcctttaatgaaccataataattcggttgctactaatttaaaagaaactttctttgtcgttaatagtggaaatcctttagataagtcaaagcgaagttgatgaccaaatttcgaaatcgtacctgtatttgtgcgatcatttcgtgtatttcctatttctaaaacttcttcacaaagactgtgatatgctgcatcaaatgaattcaacatatgcgataacacctcattttcattatttatagtatgtatatttagtttgatataacttaactttatgtagcattttgttatcactcattttaggaatatgatattaatatcatgaattccgttactttatttataaaatgctgattaagtacctaccccatcgtaacgtgatatatgtttccaattggtaattgtttacccaaatctataactttaatgctaaaaaattttaaaaaagaggttaacacatgatttgaatattatgtttgatgtcctattaaaacagttaaatttctagaaaatatagttggtaaaaacggactttatttaacaaatagaatacaactatattctctattttcaatgacagacaccatttttaatattataaaatgtgttaacctttatatttatttatgtgtactatttacaattttcgtcaaaggcatcctttaagtccattgcaatgtcattaatatctctaccttcgataaattctctaggcataaaataaactaaatcttgacctttgaataaagcatacgaaggactagatggtgcttgctgaatgaattctcgcattgtagcagttgcttctttatcttgcccagcaaaaactgtaactgtatttgtaggtctatgttcattttgtgttgcaactgctactgcagctggtcttgctaatccagctgcacagccgcatgtagagttaataactacaaaagtagtgtcatcagcatttacttggttcatatactccgatactgcttcgctcgtttctaaacttgtaaaaccattttgagttaattcgccacgcatttgttgcgcaatttctttcatataagcatcatatgcattcatatttaattcctccaattaaattgttctgtttgccatttgtttccatactgaaccaagtgcttcatctccgttttcaatacgagatatggccatttcaatttgtaatttaacttcaaacgcattgtcattaatatgggcttttagtgcgggaagctgctctgcattaccttcatcaaagataaacatagcagcacgccacctaacgattttctgtggatcatctaatagtagcaccatttctggtagtgcctctggataccctaaatcgcttatgcaatcccctgctgttcttcttacagcaggacttttatcacgaagccccttatataaatacggtaaaatttctttactttcaatcatacctaataatacaatcgcttgacgtctaaccggtactttttcatcagataaagctaaatcaagcagcggtatatcttcaaaagtcggctttggaaaatggtttaacattcgtaatcgagtcttccaattatcagttgcatgatattcatccaaagagacatgtcgatagaaatgataattattagttgcgtgattttcttctaaagcatgttttaccaatacgggtaactgtgattctggataggtagctagcacttcttctaggacaccatccattacttcttgaatatttccatagcgatttcctaaatctagccatttacgcataaaaacaatattgtcatgtgctgtttgcgcttgagtcatatggtcaacatatgtttgtggtaattgttctcttaattcttggtcagcagaagttagcttaatttgatacggtatacccttaaaagttaataattcagctttaatttcaccaaaatgattgtcaatttgaggttcatttacagattctaaaaccttattcgcatcagaaaaagcagctttaatatcaggtaatatgacttcccaatcagcttttggtgccttatcaacagctaagaagttcatgacatgaaaaatggaagtgataccatctatagataacaactgatttataaatcttggttgtgtttcttctacttttttataagtattagataacttgtcttctcttgtatatgacaaaacaactttcattgtatttggacttggtgttggctctatacgtaaaatttccatatactttattccccccgaatactagttgatgaaaaatttattcgaatacagcctctacttttggcaatactgtttcccaatttgcgtcattttctttatctactgaaataaagtccataacatggaaaattgatttaacgccttcaacctttaagatgtcattaataaatgctggctgtgaatcatcaactttagtatacgtatctgatgtcataccttctctgctttcactaagtgtaatcttcattgtgttgtggttcggtgtttctgatatagatataattttcatttgacttcctcctattgaagttcatttcctaattgttttatttctttccctattgaacactcattgatacaaaaatgatgcgccttcgttttcccctctaatttacgcagacgagttttgattggacattgattgcaataagtattcattaaatcatctattttcgcgagtgcattttgctctgaaaaagttaaaatacgcgacacttcctttattacttcaaaatattgcaaccttgtaaataagtgttactgttttaaatttgacataaaaatattataacatttttgaccctaagatttgaatgaaaccttttacaattctatacgtaaaatgtatttatattcaaatgctattgcatcgcaaacgatttttcagtaaaatgagttagttatttattgagcggtttctaaacacccgcatgatcaaaatttaggaggacattttaatatgtataatgaaattttaggactagttacgtttattgcaacgttcgtgcttatggtacttatgtatcgcttttttggtaaacaaggtttaattgcatgggttgcaattggcacaatcattgccaacatacaagtgattaaaactgtagaaatctttggtatttcagcaactttaggtaatgtcatgtttgcttctatttatttagcaacagatatattaaacgatatttatgggcgtagagttgcaaaaagagcagtttggttaggcttttcatcaacattaattatgattattgttatgcaattgtcattacattttattcctgcaccagaagatatggcacaaaaagcattacacgcaatctttgatgttgtgccacgcattgctttaggctcaatcgtcgcatatattattggtcaacatattgatgtatttatcttttcactaattaaaaaagtatttagttctgataaaacgtttttcatccgtgcatatggtagtacatttttaagctcaataattgatacagctttatttgtagctatcgcatttatcggaagtttacctggtacagttgtatttgaaatatttattacaacgtacgtattaaaattagcttcaacagttttcaatgtaccatttggatatattgctaaatcattttatcgtaaaggtaagattgataagttagatcaaggctattaacgcacttactacacaaaagaataagttttaagggagtgggacagaaataatattttcgcaaaatttatttcgtcgtcccaccccaacttgcattgtctgtagaaattgggaatccaatttctctttgttggggcccatcccaaacttgcacattattgtaagctgacttttcgtcatcttctgtgttgggacccacaccccaactcgcattgcctgtagaatttcttttcgaaattctctgtgttggggcccctgactagaattgaaaaaagcttgttacaagcgcattttcgttcagtcaactactgccaatataacatcgtagagcatagaacattgatttatgtcccagcctgaagatgatttttttaggaagtatattacagtactacgtattagaaaatcatctttgaatcagcgagtattttaaacacgtgttacttatttaagtgatgcgtgttttttaatggattacccaacatattttgtattacagtaatagtaactttaactaagtattgaatagaaagtaggtttattatggcgaaaataaattttgatgctgcgacgaaaggaaatccaggcataagtacatgtgccattgtaatcaaagaagatgagcagcattatacatatacacatgagttaggcgaaatggataaccacactgcagaatgggctgcatgtatttatgcactagaacatgcacgtgaattaaatgttcaaaacgcactattatatacagactcaaagctaattgcagatagcattgaagctggttatgtgaaaaacgcaaatttcaaaccttattttgatcaaatagaaatatttgaaaaagattttgatttattatttgttaaatggataccgagagaacaaaacaaagaagcgaatcaacacgctcaacaggcattgtataaattaattaaaaagaataaataaaaggagcaccgactgatgtgatgtcaatcggtgctcctctatttatcaaagaaacaaattattttttatttttcttagctttctttttcttctttttagctgctacctttttagaagtattttttgatgctgactttttgtctttggattggttatctttttgatttttctttttagccaataataaaggaacgtcctcatctttagattcaatactagttgttgtttcaacatcttcctctttatctttgcgtcgttttgcgaataagagtggtgaatgttcgttatctttcaacactttttcatctgtgttttcatttgtaacttccacatcttcttcatcttctttacgacgacgttttggtaagaagaacggcgtatgtttaactttatcgagtgactcgccattatttagcgaatctttttcttcaacagtaacatcttcttcatcttcttttctgcgacgtttcgcaaataaaagtggtaaatgttttgtatcgtctaaagtctcttttattgaatctttattattatctcttatttctaattcttcctcttcatcttctttacgacgacgtttggcaatgaagaaccagaaactagctagtaaaccagagatacccaccacaccaatagcgtttttaataacattaccgaaattattactaaagtgacgcatatgaagtggatcaatgtcatcatcttcatcaagtttctttttatgtccaatagtcgaactgttaaatggatgatttgcagttccataaccaattgttaaatggctattagattcatttccagtacttgacgattgtttagcacgatcagatgttacaatttgtactgctgaaattcgagcaataccattgttcaatgcagcctcaacttgctgtaatgtatgcgcattattaatatctctaattgtttcaagcacaatttcgttaatttgattcattgctgcttgtttttcatcagctgtgccaatttcactatttcgaatactatttattttttcatttgaaaagtctttaattctactaatagcttcttgcttgcgtttagctagttcttttgctgttggattagctgctttcatttgagctttaaattgttccaattgctcacttatttcatcgatgctttgcgcacgttgaatcgcttgaattgcttgttcttttaattgatttaacttagcaatagcttcttgcttctctttatctgttagatcagtacgagctttgatttcatcaatcatatgttgaattgcatcttcaatcgatttaattgcatttgattttgcttgttcaatcgtaaattgttctggattaaattgttcaatatgcgcttgttcttgttgttgaatttcttcaactgaatgaacatcaggtgcattgttaacatgatcaattgcttgttgtttaagcttattaacttctgcaattgcagcttctttttgttccagtgttaatgtcacactattattgatttcattaatcttttgttgtgccgcattttcgattgattcaattgcctgttgtttgactactgacaattctttttctacaacttttacaggaacattaacaatcacttttgatccatcaagcaatgtaacttcaacttttgctgttaagctatcagaaatcgttgcagttgatggtgtatcgatgacttctgctgaaagctgatcaattaagtttatgtgtgcaagaatatcttgttctgtaatgatgtcatcacgatgtacaatgagttcaccattaactaggatttgctcaggtgttgcttcaaaaatttcatttacagcaggttgttcatcaacctcccatacatgtgtatttctaatgtcatctaaacctaagtttaatcctcgatttaattgatctatagtttgagcattctcaacgttttgtagtgctcgtttttcagcttcgtcaatttctttgagcgcttttgctttttgctcaggtgttaaatctggatttgaattgatttgatcacgcttcgcattagctaaggcttttattgcatttttcgcatcttctttagctttcactaaatctttgatgtcttgcaatgcttgtgcaagttgtgcttttgcctgctcaatttcttctttagtcagcgcattgttaatgtcgttatgaccttgttgaagtatttgattaattcgatctttaagtgcttgtttttccttatctgttagatttggattttgatcgatttcgtcaattaaagcttgtacacgtttatcaatatcatttttcgcatcttctttagctttcactaaatctttgatgtcttgcaatgcttgcgctaaacgttcttttgcttgttcaattgcttcttttgtcatcgcattgttaatgtcgttatgaccttgttgaagtatttgattaatacgatctttaagtgcttgtttttccttatctgttagatttggattttgatcgatttcgtcaattaaagcttgaacttgtttatcaacatcttgtttcgcatcttctttagctttcactaaatctttgatgtcttgtaatgcttgcgcaagttgtgctttggcttgttcaatttcttctttagtcatcgcattgttaatgccgttatgaccttgttgaagtatttgattaatacgatctttaagtgcttgtttttccttatctgttagatttggatttcgatcaatttcgtcaattaatgcttgaacttgcttatcaacgtctttattggcatcaatttttgcttttggtatttcattggcatgcacttgttcaatcgcgtggttgcctgctgtttgaacttgagatacagcctgattacttgttgctttattaatgttgttgatgatgctgtttgccaattcttctgctttatttttcgcaataagcttgtcttgatccgtcgcatttgaagcttcgatttcttttagcttattagctaaagcttgattaatagattgaattgccttgtctttagcatcttgtagtcgttgatcaccattaagattatggattgcatcattgactgcttggattgcgccattgatatcattcacatttgtgttatcactatttagcaatgtatttgctagacgtttggcatcatcgaagtttgttttagcattatcgtcagcgttttggtaattgacagtttgctctgcatttggaatttcattgtcaactaaatgtttcaatgtttccattgcatcatttaagtcaatttgattattaacaatatctgttacatctgatacagtatcggcattgttaattgctttatgtgcaagatcttgttgctgttgatttaatccatttaacgaattaacaaacgcatttgctttatctttggcatttgcaaggttttggtctccatttaatgcattttgagcatcgataatattttgtttcaattgctctgcttcagcttttgcaattgcattaccttgcactttatctaactcatgtgctgcattcgcaattgcattatcataatttgctttcaaattgtcatctgcattgatgtaatttgtgctgctgataacaccaaggtgctgttcgtcaatatattgttgtactgcacccattgcattatctaatttagttgctctattaattgctcgagatgctttatttagcgtttcagcattattaatttgttggattgctaattgtctttgagcattgtttagatgtgttaattgatccaatctttgtaatgcttcagctttacgattattaagtctttcttcaccatttaatgctttcttagctgcagtgactgcatcatttaatttgataacttgttttgcagttaagttttgaccagtcgatttatcaagtgcttgtttcgctttatcaaccgtttcatcatatacttgtttgacttgtgtatctgcattgacatagttcgtgctacctttcgtgcgtccttcattgtcagtgatttcttgtgacaattgatccattgcacgattaagtgccttagcctcatctacaatttgttggatttgatttaaatcgtttgattgatcgatgcgacctttaaatccatcttgttgagcattgtttaatgcattcaattggtcgatgtcatgtttaccatttgttttagcaagtgctacacgttcatcaccatttaatgcttgttttgcatttaaaatattttgaagtgcttgatccacttgttgcttattcgcattttgtttcaatacattttcagcatcagcaatagcttgtttataagcattttgtttatctgaatctgcttgtgtgtaatctacagtttgctcaacgttagcatgttcattaactgcttgttgtaattgatccatagattgattcaattgcgttgcttgatctactaattcagcaattggttgaagtttcgtcgcttgatcaatgttttgtttagcagttgcaatttgatcagcatttaaatgtgttaattggtcaatagtttgtttcgcttgtgttttagcttcagcgactctctcattaccatttaactcattttctttttcttgaagcttagttaatacttggtctacagcgtctttattcgcatttgaaccattagttggatctgtaatgctttctgcagcttgtaacgcttgatctactgcttcttttttatcagttgacgcttcagtgtaatttggttgagccttatctgtattcacttgatcaactttatttttcaatgtttccatcgcgtgatcaagttcagtagcagtttgaacatgttgtgcaacctctgttcttgtaggcgctgcatttatagcatcagttaatgcttgttgttgtgcatgatttaagtttggcaatgcatttacagttgttactgcttgttgttgatcacgagcaagtttttgatcaccatgtagattatcttttgcagttgttactgcttgtgtcaattgttctacttgtgatttgtcgagtgttggattacctgtttggttaattaaatcttttgcattttgaactgctgcttggtaagcatctttttgcggtttatcttcattgataaacttgctaccagattctgtttgttgttgatcttgaatactattacgtaatgcttgcattgcttgatcaagcgcttttgcttcagctaatttttgtgctacttcgccacgagttgctgcgttgtttatttggctttcaagtgcttgacgttgcggattattcaaaccatttaattgatttaaatcagtaaccgcatgttgtttatcgtctgcaagtttttgatcaccgtgtaggttatctttagcttggttaacagcttgtgtcaattgttcaacttgtgctttatcaagcgttggattgttagtttgattaattaaatcttttgcattttgaactgctgcttggtaagcatctttttgtggtttatcttcattgataaacttgctacccgcttccgtttgctgttgatcttgaatgctattacgtaaagcttccattgcttggttaagtgcttgtgcttcagttaatttttgtgctacttcgccacgagttgttgcattattaatttgattttctagcgcttgttgttgagctggtgttaattgatctaaatgatttagagaatttccagcagtttgcttatcttgagctaatcgttcaacaccatctaatgcatttttagatgatattactgcttgagtcgcacttgatacattacctttattgatagttggattatttaatcctgcaatgatagactcagcattttgaactgcttcatcataggattgttttttattcggttctgcattgacatatgcactgctcgcacgtgttgcatctttgtcagcaatactttgttgtaatgcatccataagttgatctaatgcttgtgcttcagtcaaatcttgcttaactgctgttctagttgtttcactatcaattaacgtatcttccatatgtttttgtgcattgtttagatgtgctaattgactaaccgtttgcttagcatgatctttatcattttgtaacttcacatcaccatgtaatgctgctttcgttgtattcacagttgtcgctgcttgattaatcgcattattatctaatgttgcagtttgttcattgataatattatttgcggcttgaacagcttgatcatagttttgttgctctggttgatcttcgttgatatatttgctatttgctttagttgctgcgttatcttgaatgctctgtcttaaaccatgcattgcttggttaagcgtattcgcattttgttcaatttgatgaactgcagttactaaagttgcagctgtaacttggtcttttaatgctgttttttgaggatcatttaagcttgttaaagcatcaattgcttgcgtcgcatttgttttagcaacttgtaaattatggtctccatttaacgcttgaagtgttgtttgaactttagtaatagcttgttctacttctgtttggttcgcattttgaccagtttgtttgttaatcattgctgctgcttcatttaccgctgtattataagcagtttgtttatcagtatcagcattgatgaagttaccacgttgttcaacggcttgatgatctgcaatcgcattaattaagttacccatcgcagtatttaaagattctgctgtttgtttgtgaccattaactgcagcaatatcagatgattgcgtaatttgtgattgtaactgttgcttttgcgcattattcaaatgatctaattgatcaagtctgttgtttgcttgttgtttagctgctgcaaggttttcatcaccatctaatgcaactttcgtattattcacttgtgtcgttgcaccattaacatcatctggattcatcgtaggcgatgtagtttgattaatgatattattagcagctgttacagcttggttatagtcattttgtctttgcgcagttgcatcatgataatcttcagacgctaatgtcgtttgattatccgcaacactatttcttaataattccatcgcatgatctaacgtttgtgctttttgattaatcgtagtgacatctgtaacaagtggcgcttgtgtaatttgactttcaaatgattgtttttgtgcatcatttaagtgtgttaagttcgccaattgttgttttgcttgttgttttgcatttgccaaattgtcattaccatttaatgcttgtttcgctgcgttcacttcattagtgatgctttcaacttgtgcttgtacttcattagtaccactttgtttattcaataatgcttcagcttttgctactgcctgtttatacgcattttgtttgtcaggatctgcatttaagtaattaccgtccgctaatgtttgagctttatcattaatagcttgtgataattgatccattgcttgatctaggctcgttgctgtttgtttaacttggttcactgtagcaatttcaggcgattgatcgatttgaccttttaatgcttgtttttgagcatcgtttaaatgcgtcatcccacttacggcatctttagcattttgcttttcagttgccaatttagcttcaccgtttaagccatttttagcatcagtcacttgagttaatgcacgtgttatttcatctgggttaagcgttggatttgtcgtttgattgataataccttccgcttgagacactgcatttgtatatgctgtttgcttatcggcatcagcatcatgatagttctcacttgctttgacagtatctttgtttgcaataccttgtttcaagttactcattgctgtattcacattttgtgcattttgtttagtttgttcaactgtagctaacgcttgtgcttgattgatttggttacgtaatgcatcacgttgtggttgatttaaatcgcgtaacgtatcaagatttgctaaagcttcttgtttcgcttgtgctaatttttcatcaccgtttaatgcatctttcgcttgattcatagttgtcactgcttgtgttactgtatcaggcgtcaatacaggtgttggtatgccatttgcgatttgttgcgcttggttagccgcattgttatatgcttgttgtttgtcttgatccgcttgtgtaaagtcaactgactgtggtacttgactgttcgcttgaatttgttgtttcaacgtacccattgcattatttaacgcatcagcattttgcttaatagcattaacacctgtaacaagttctgcatgcgacacttggtcttttaatgctgttttttgtggttgatttaagtttggtaactgatcaatggctgtatttgcattgtctttagcaacttgtaagttatggttaccgtttaaatcacccttagcttgattcacttgttgtaacgcttgagccacttgttgtggatccacgtttgcatttggtgtaccactaattatttgttcagcatgtgctaccgcattgttgtaagcattttgcttatcagtatcagcattgacaaagttaccatttgctttagtttggtctttatctgcaataccttgtttcaattgtgtcattgcttgatttaaatcttgtgctgtttgcttaatcgtgtttacatttgcaacagtttgcgcagcatcgacttgttgttttaatgcatctttttgcgcttgatttaaatcatttgcatttgtaatcacttgtttcgctgcatcttttgcacgttgtacattgtcattaccattcaatgcttgtttcgcttcgttcacacgttgcatcgcttgttccacttcagtttgacttgcattgctgccatttgctttagataaaataccttctgcatgtgaaaccgcattagtataagcatctttcttagcttgatctgcatcagtaaagttaatgctatttaatgtctcagttttatcttgtaatgcattgtttaagttagtcatagcattattcagattttgagcattttgcttaacattattaactgttgcaatatctggtgcttgttcaacttgagttgttagcgcttgtttttgagcatcatttaaatgatctagtgtaccaagtgttgtcttagcatcttgtttggcatcagctaatttttgattaccgttaagtgcttgatttgtgtcattcactttagttaatgcttgttgaattgtatttggatccattgttggatttgttgtttgttttaacaattcttctgcttttgttactgcattatcatatgctgtttgcttgtcagtatcagcatcgtgatagttctcgctacctttaatttgtgctttattcgcaataccttgtttcaattgtgtcatcgcgtcattaagcgttgtcgccgcttgttgaatagcattgacgtttggtacaagtgttgcttgcgtgatttgtttgctgtattcatcacgttgcgcttggtttaagtttggcaattgatcaatagcatgttgaacattttgtttcgccgttgctaagtttgtattaccatttaaatcatttttagcttgcgtaactttatttaacgctgcagtaatttcgctaggtgtaacgacaacatcaggcgtagcactaattaatgcttcagctttcgctactgcttgattatatgcattttgcttatcaggatctgcattgacaaagttaccatcagcttttgtttgttctttatctgcaatgccttgttttaattgtgtcatagcattgtttaactcttgtgctgtttgtttaacattgtttacaccagctacagtagttgcattttgaacttgttgttttaatgcgtctttttgtgcttggttaaggtcattagagctattaattaatgctgttgcttcgtcttttgcatgttgaacgttggcattaccatttaatgcttgttttgcagcattaacttgtttgattgcttgttcaacttcagcttgtgttgcattgccgccattagcttttgaaatgatattttcagcatttgtaacagcagtgttatatgcttgttgttttgcttgatctgcatcagtgaagttaactgtcgctttcgtagcatctttgtcagctatcgcttgtttcaagttacccatcgctgtatttaagttttgcgcattttgcttaatttgatttgcttcatcaacagtatgcgcgccattaatttgatcagtaactgtttgtttttgcgcattatttaagttatctaatgaacctaatgattgtgacgcttgttgtttcgctgcctctaggttttcattaccatttaatgcatttttagttgtgcttacttgtccagcagcttgattgataacagtcggatctaaagttggacttgtagtttgatcaataataccttgtgcagttgtgacagcattattgtacgcatcctttttattctgacttgcatcagtataattttggttttgttttgttgtcgcattatctgcaatactttgacgtaatttgtccattgctgcatcaacattgtttgctttttgctcattaccttgtgcttctgcaacagtagtcgattgttgtaccaattgttttaatgcctctttttgtgcatttgttaaatggcttaaaccgtcaattgctgtatttgcgtgttgtttagctttttcaaggttttgagtaccattaagcgctgcttttgtagcattcacttgattcatagctgcttcaacttgatctttaggcacgttcgtacctgtagatttatttaaaatattttcagcattatgaaccgcttcattgtatgcatttttcttctctggatctgcatctgcaaagttttgactgccaagtgtagtgtctttatcattcaagctatttttcaagttacccatcgctgtattcagttcctgagcggtttgaatggcttgcgttacttcagctacagtgtgcgcttgattgatgtttccagtaacagcacctttttgtgcattgtttaagttatctaacgtagataatgtttggtttgcattgtttttagcatctgttacttttctatcaccattcaacgcttgtttcgtagttgttacagttgaaagtgctgcttcaacttgtgattggttcgcatttgtaccatttgcttgattaataatattttcagcagcagttaccgcattgttgtatgctgtttgtttttctggatctgcatctgtaaagttaacactttgtttcacttgatctttgtcttggattccgttgattaaacgttccattgcttgatctaattgttcagctttagttttcacttgatttactgtgctaatatttggtgcatttgtcacttgcgtatttaaatcttgcttttgagcattatttaaatgacttaattggttgatgttagcagtcgtttcttgctttttattcgctaagttttgtgcaccattaagcgcagttttgttagtgctcacttgattagctgcttgtgttactgcagatggatcaagtgtcggctgactcgttgcattaatgatattttcagcatttgtaactgctgtattgtatgcattttgtttatctctatctgcatcaacatatggttgactcgcttttacatcatctttattcgcaatactatttcgaagttgattcattgcattatcaagatttgtcgcgttgtctttcacactttgaacgccagttacttgtgtcgcgctatcaatttgaccagtaatactttgtttttgtgcatcagataaatgtgtcatttgacgtaatgcatctttagcttgttgcttcgcagttgctaagtttgtatcaccgtttaaacctgtttcagcattattaacacgttgtgttgctgctgtaacatctgctgcatttgtaatcacattaggcgaaccatttacaatgtttttcgcagcattatatgcatcagtataagcaccttgcttatcaggactcgcgttagtgtaattaccactagctacaattgtgtcatgatcagcaattgcttgttttaattgatccatcgcattattaagtgatgtagcactatttttcagatcagttacacctgatacacgttgcgcagcgttcacttgttgttttaatgctgttttttgtggtgtattcaaatgtgtcaagttatcgatagcttgtatagcttcagttttagcgcgttgtaagttcgcgtcaccgttcaaagcattttcagtagacgttacactttgaattgcttgttcaacagcttgcttatctttattcgcaccgtgatctttatttaagtaagattcagcttgtgtgatagcattatcaaatgctgttttcttagttggatctgcgtcgatgtaattttcgctcgctttagtttgatctttatttgctatagctgattgtaatcgttgcattgcaccatctaagtcttgtgctttcgttttaacaccatttacaccgttgactgttgttgcgccttcgatttgtgatgttaaatcttgtttttgtgcattatttaagtgtgttaatgtacctaagtttgctttcgcatctgattttgcttgtcttacatttgcgtcaccgtttaaagcattcttagcagtcgttacttgatttaatgcagcttcaacttgtgctttcgtcatattttgaccgtgtgctttatctaaaataccttgagcattcgtaacagcatttgtgtaagcatctttcttaccttggtcagcatctgtaaagttcacttgttgtttaacagtgttttggtcatttataccattttgaagttgacccattgctgtatttaattcattagcagtattttgtgcagcagttacgcctgctactgtcgttgcattgtcaatttgactagttgctgcagttgattgcgcattattcaagttactatatgaagctaatgcacgtttcgctgactcttttgcttgagcaactttattatcaccattcaagtcatttttagcttgattcaattggtttagtgctgcttgaacttgtgtttcattcgcgttgctgccattagcattagtaattgcttctgcttgtgtaaccgcagtatcatacgcttgttgttttggttgatccgcatctgtgtaattgacactacgtttcgtattatccttttcagcaagtgcatgtttcaaattacccatcgctgtgtttaacgatgttgctttatttttagccgctgtgacagctgcaagatttggtgcttgatccacttcagcatttgccgcagttcgttgtgcattgttcaagtctgtcaaacgaccgatatctgatttcgcagtttgttttgctgctgctaatttttcatcaccgttcaatgcagacttcgcactgttcacttggctcgctttttggttaattgtatcaggattcatttcagggttattcgttgcactaataataccttcagcattagttaccgcatcattgtatgcattttgtaaatctgcattcgcgtcttgataatcttcgcttgatttagtcgcatctttagaagcaatactttgtcttaattgattcattgcttgatctaaagtaccggcattagcttgaataccttgaacacctgcaacagtcgtaccactttcgatttgcgatgttaagtttgctttttgagcatcagttaagtgtgacattgtcgctacttgttgtttagctgtgttcttcgcttcatttaatcgctcgtcaccatttaatgctgttttagcagtattcacacgttgtaatgcttgttcaacagctgctttattgtcatttgaaccagctgttttatctaataacgttttagctgctgttacagcgtcattgtatgcagtttgtttttctctatctgcatcagtatatttctgagctgcttttgtagctgcttcatcattaataccattttgtaagttgctcattgctgtatttaattcagatgccgttgtagacacttgatttacacctgcaactgttgtcgcaccttcaatttgtgatttcaatgcttctttttgtgcattattaattgatgttaggttattcaatgcatttttcgcagttgtcttagcgttcgcaacattttgattaccgttcaattcgtttttagcacgttgtacattttctaacgcagtttcgacaccgtcttttgaagtatttggaccttgtgctttatttaaaatttgttcagcttgcgtcactgcatttgtatatgcattacgtttcgcttcgtcggcatcagtgaagttaacaccttgcttaatcgtattctgatcttgaataccatttttcaagttcgtcatagctgtatttaatgcatccgcattattttgtgcttgtgttacttcattaacatgcgttgcaccttcgatttgacgtttcactgcatctttttgagcgtcagttaagtcacttaagccgttcaaatgttgcttcgcatttgtttgcgcagttcttaagttttcttgaccgtttaacgcttgttgtttagctgtcacttggtctttcgcttgattaatttcttgcgcattcattgatggactagttgtttgaccaatgattgcttttgctgcagtgactgcactgttgtagtcagtttgtttgttttgacttgcatctgtgtagttttgacctgctttaatcgttgcttcattcgcaatgctatctcgtagacctttcattgcagtgtttaatgtttgtgcattatcacgaacagtttgaacatttggcaacgtcgtcgcttgacccacttgttctttaagttttgctttttgcggaccatttaaagaagttaaaccatcaattgcagtgttagcattttgtttcgctacttctaaattatgattaccgtttaactgcgtcttagcattcgttacttgcgttgctgcatttgtaacatctgctggtgttaacgttggtgttggtgtaccactaacgatattttcggcagctgtaactttttcatcatatgcttgacgtttattcgcatcagcattgacatagttaccactagcttttgtctcagctttatcagcaatggcacgctttaaagctgtcatcgcagtatttaattcagtcgcagtatgttcaacaccatttgctgcagatacacgtcctgcacttgttacttgtgcttttaatgcttctttttgttttgtatttaagtccgaagcatttgtaatcgctgtgttagcagcctgtttcgcacgatctaagttttgaataccgtttaatgcagtatttgcttgtgtaacaacttgcattgctctttcaacatctgctttaggtgtattaccgccagctgttttatttaaaatagttgctgctgcatttactgcttgagaataagcagttcgtttagcatcatcagcatcttgataattttgactttgtaacgtcgtgtctttatcacgaattgatgtttctaattgacccatagcaccatctaattgttgcgctttggctttaactgtattaacaccttcaacatttgttgcttgtgtaatttcattgtctaacgctgtacgttgtgcattattaatgtgtgttaatgtacctaacgtttgtttcgcagctgctttagcttcatttaatttcgcatcaccgttcaacgccgtcttcgtactgttcacattttgcaatgcttgttcaactgctgctttgtctacattttgaccactagcttttgttaaaattgctttcgctgcatttactgcttgatcataagctgatttcttacttggctctgcatctaggtatttctgagtttgttttgtttgtgtctcatcattgataccattttgtaaactatgcattgcgttatttaattctgttgcttttgcagtttcttgatttacaccagctactgttgttgcaccatcaatgctacgcgttaacgcatctttttgtgcattgttaattgatgttaagttattcaagttgtttttcgcagttgtcttagcttgagctaagtttcgcgcaccatttaatgcctgttctttagttgtcacttgtgatgttacttgcgtaatagtatttggttccatcgttgggttcgatgtttgattaatgattgcttttgctgcagtaactgcactgtcgtactcgttacgattatttggacttgcgtcagtgtagttttgacctgctttaattgttgcttcattcgcaatactatctcttaagcctttcatcgctgtattcaacgtttgagaactatttttaacagtttgaacaccatctaatgtagttgcactttgaacttgttcttttaattttgctttttgtgcattattcaattgtgctaagccgtcaattgtattgttggcatgctctttcgctacacgtaagttgttatcaccatttaatgctgttttagccgcattgacttgtgatgccgcactatttacgtcattgactgttaatgtcgcattcggtgtaccactaatgatattttcagcgttagtcacttttgaatcatacgcttgacgtttttcttgatcagcattgacataattaccgcttgcttttgttctttctttatcagcaatagctgctttaagtgctgtcatcgcactgttcaattcagttgcagtgtgttgaacgttatttgcatcagatacacgttgtgcattgttaacttgtgtttttaatgcatctttttgtttttggtttaagtcatgtgcgttgttaattgtgttcgtcgcatttgttttagcttgagctaagttttgtgcaccatttaacgctgcttttgttgtattgacttgatttgccatgccattaatcgcattagcatccatatttggattgttcgttgcattaataacaccatttgcattatttacagcagtattgtaattatttttgttgctgtcagatgcatcaagataattttgacttgttttcgtcgtattatcattttggatacttgtacgtaatgcacccatggcagtatttaacgtattacctttatctttaacaccatttacacctgctacattttgcgcttgttcaacttgatgcttcaagttgtctttttgtaattgtgttaagttaggtaaaccatcaatcgtatttgttgctgaagttttcgcatttcttaagttgtcagcaccatttaaagccgctttcgctcttgtaactgcatttaatgcattatcaacgtctgctttagatgtgttaccaccagtttgtttatttaaaatgccttcagccgctgtgacagcttgcgtatatgcatttcgttttgattcatccgcatcaagataattttgatttcttaatgtcgcatctttatcattgattgaaccttgtaagctattcattgcgccgtctaatgtattggcatttgttgctgtttgtttcgcttgcgttaaattatgtgtaccatctaatgcatttttcgttgatgtcacttgtgtagcgatttggttaattgcattagcatccatatttggattgcttgttgcattaatgacaccattagcactatcaacagcattgttatagtttgttttgttacgttctgtagcatcaagatagttttggccatttttcgtagctgtgttatcttgtatgctatttcttaacgtacccatagcaccatttaatgtgttggcacttgatttaacagtatctacacctgcaacattttgtgcttgttgcacttgttgtttcaatttatctttttgagcagttgttaaatgttgaagtccgtttatagtagtgtttgcatttgatttagcttgctctaaattatggttaccatttagggcacctttcgcattagcaacttgtgacaacgcgttttcaacggcagttttgtctaaatttgatccactatttttattggcagtgtgtcaatagaaaaatgagaatttcttaaatttttttaataaatattactaaaagagtacagaagaagaaaaagaagcattttactagtaatatctgtcaaaaatcacagatttaaatagtatgcttctttttagattatgcattttatatacaaaatttattcgtcctgtccttccgcgctcattgtaaaccattcgcttagattaacctatattaattgacgggttcgtgcctcacacagtcatttaatataggttcacaattttgtgtgcttacatggtactttagcatttcctcactcgatttatagtcaaatatcattcgaggccgtgtattaatttgtttaacagcttcatctaatgacttttgtgttatatttgcaaaatccgtacctttaggataatactgtcttaaaagtccatttacattttcaatggaaccacgttgatatggacaacccaaatcactaaaataaatactacaattcaattcatcttctatttgttcaaatagagcgaactccttacctctatccatagttatgctttttggtaataatggtttcataatatttataatctcattacaaactacattggatttacgtgtatttaatctactagcatataaatatcttgtttttctttcaataatagttaacaagcaatatgttgatggtctaacactccaaacagtatcaatttcataatgtccaaattcttcacgattattaatactttttgagccgatactttataacacgagaccctacgtctaatttgccacgcttttcagaagacttattatattttttgcctgcttgtctcatatcacgcttaacatcaacttttaccaatccattgcgaatatatctatatatagtaggataacttatataatgccctgtatctttttcaatttgacttgctatctgtctaggagaccattttaatgaaagtttttcttcaatatatgcttttgtttcatcattcaaacgtctacgtttagcaacttgttcatctgaaatactacggattttatagcatcttcctcagctaataaaggattataaacaccatcaacagaacgcttatttacttctctataaagaaccgcatcatcacgacctaaaatcttagaaatctgaatgatgtttaaaccatcatttaaatactttgcgatagctagacgtgttttataatctaattctttacgtttttttctttttttcatgtatatcctcctttacttttaaaaaggttatttataaaataagttataagaggatatatgttcatcaactcccgataccaccgctaaagcgtatagggagttgattctttattttttcatattattttcttcataaactggtttatgattactttgatattctttttcattcatatcttcaacttttacatatttatctgttgtctcattttttttatataaacttgtccacactgtaccatctttatcataaacaaaagaaatagttataaatttaccatcttcatatactttaaaatcactattacttttttcaggcttcttaaaagaagactcactcatactttttctttcagaatttaaaactgcatcaatctctttatcatatttctgaccacatgcagataataatataactaatcctaaaattaatacaaaccatcgcctcatgataaattcactcctttttacgtaaattatatcattgctatcgtcttgaaacaaactaacgtcctagaggttttaaattgaaacgttttaaattatcaatacgccaaccttcagctgtacgaactaaatccaattgtgcagatgtttgacgatgttcaattttatcatctccatctgtttcaatacgttcgtcgaactgaacaaaaactttataactatcttttttagggtcataagtatcaaaataaacatgaatatcattaaccgttatatcatcatataaatcatatttatctttagaatccttaaataatgtatcgtaataatcctttgtaactaaaggctttatttgtggtgcttttgatttaaaagaagaatcttttttcatttcaaacatctgtttaacaaaatttgaagaaacttcacgtatttgcttttcttcatcagaaataactgtttttgattgtctctttactagtttatttaactctccatttttatctcttaatatacgttgttcttcctgtaaatcttcaatttgattttgtttcattttaacttgttgtttagggatctgataaccaattaaaacagcacaaaataatattactgttacaagagtaaacataataattttttgcttcatttattttcactccttatcatgaataaaactatatccatcagtcattttcaatgtacgttcattaactttaaaagcagcttcccaattcatttctgttattctaaatgttttaccaccatcacttacaccaataacaacaaccacatgaccataatgcccatcatgaccgcctgcaccttgttcagcaataaataatgcaccaggttccggatttttatcaactttataaccctcagccttagccctatcattccatttatgtgcatcatgccaataagttgatacaggtttacccattttttgacgcataccgtatgcataccaagtacattgaccggcagtgtataaattaccttttccagggtcatcatttgaccaatgtggcaatttaccattaaactttatagactttcctttaccattactacatgacgttttagcttctgaaccgcctaaatctttcataattttttcaactgttggtatccaacgggcattcatattattagggtcatttgacgcaccaacaggcgcatatttgggacctatttttttaggagtatctaaacctttagaaatataaacatcatacaaatttttagctcccgcattaagaccgtcttcaatagttggatatgttgaatcatgaatcgattttgaacccataacagacaaaggattattttgtcttgtcgcattttctcctttaccccattgtgattcactcgcaataatagccataaaaatattcacaggtactttatttttttctgcaattttctgtatttcttttcctttaccctctaattttccacctttagcattttcattaaacttatcaataccatttgccgaaacattaccgccactaacagtacaaccagcatcatctttatctttatttgaatcaggcgctaacaaaaacattacaattactggaaatgtaaaaaaagccaccacacacaaaatgatgatgactttcgctaatttcaatttaacacctattggcgttttacctattacttttttagcaatatcttttttatttaccatgcttattgatatccttttgctcttttagacggtcttttgactgagaattacgtgtaataggttgattacgatttccagattgtctactttgttgattctgtgtcgcattttgtatttgtcgtttttgaacatcagtatcataagcagtttgaactgacttctgttctttacgatttattgaatgattctcattatttaatggctgattaaccacttgtggcgacctttgtatatcttttcgctgtcttgtttctcgtacttgatgctcttgctgtgatgctttttgtggttgtttagaataatcatttgcatttgattcaacagaagcagattttacatcattaccattcattgactcttgttgttctcttcgcttattaccatttttttgattatctttatttataaataaaggcattggtttatcctgctgtcttcttcttaaatcattatcattttgaagtggtggggcgggttcatctctttgattttctcgtttagctttcttattttgcgcttgttcatgacgaatcttattaaaacgttcttgtgttcgattcatcacaccagcaccaattgcactaggagaaaaactaatattaccacgacttacaaaattgataatttgagcccgttttttatacattacaaacaatattacaattataaatattgaatttaaaaaataagcattttgactatccggttcaataaaactatttgcaagcttgatacacaaaccaactatcacaaataagaatgtcatacaggcacttaaaataatatagcctaacgtttttgcaaacgcagagaaaacagataattcaaatcctggtataaaactcactatccaactgaatactaaaaataagaataaaaataaagcaaatgtagaaaaaatcaacttcgcaaaactaattgataaaaatacaattgacataaaaacagtaataataaagccaataactgaaatagccaacttttgaaatacataaccttgcgtcatatatttattatcttttttctcaacctcattttttacaattttatcaatctcatcttgtcctttttttgaaaaatcttgttttaaaatgttatcaatacggtctttaccttttgcttttatctctttttcgtctacagttccataattcattactaaatatgttctatatatcgtcatatcaaataattgattacgtatatgattcatacctgaattctcatgaatataatcaatgttcccatcaatagaagatgtactattcataattatattattcaaatccttaccaatattgtttgtaccacgtataatattacctgcattcgcaagtataccaacaccaaaaccaatcaaacacataattaaaaacgctcgctttaatgcttctcttgcattaccttgtacactaaaaataataaatgcgttaaagcaaacaataataaataatgttattgccaaattactcaataacttttgatatatatccccaacaaaatcgccgattttatccgcaaaatcattaataacatctagttgaaataaattttcaatcgcataatctgtaacacctgctaaaatcttagtcatagaaaagaaaaaatctgacacattattaatttgtcgtgaaatttcttcttgaccaaacggattccagtcgcctttttcactatatattgaacgataatgtgataaatcatacttttcaatttttggcttaactgcatgtgagggctctccaactggattagaaacagcgtaagcactcacagatgttaaaagcagaataggcaaaattaaaaagcataaaagatacacacttttatgcttcatcaaatcactccttatttaatatttgtttcacatcttccacaaaatcatattgttccattaaaggtgcatcaaataaaattggttcattatattgtccaagtatagatatataacctcggccgatatcactatcatgaatcgtttgaaattctttatcagtttgaccaaaggtcatacgataaccatcatttgacaaattacctaaagacacacgtaaccctaattggtcacgcacattacctttaatcacatctgcatctggtctttgtgctgttaaaaacataaatacaccagcttgacgacctttcataataatattaattaaataatcattcatttcttgtaattcttttttatctaaagttgaagtaaaagccgttacctcatcaaaaataatgaaataggggcgcatatcaaaattacggaaatcatttccgattttataatccgaactatcattcattaatctaaaacgctcttccatttcattattagcttctctcaattgttttaatatttgacctttagtatctgcaactttatcatcaccaataacgcgcttcataaagctcaaatctgaaacttttgggtctaataaacgtacttctgaatgtctacggaataactcacgaatcacataaaataaaaaatatgttttaccacctccggttatacctgtaaccaatccatgaggtgctttcacaaaatcccaagtaatttgatgcgtaatagcaatttttgtatcataaaaaattgtatttgattcttgttcgccattcataacaatacgctttttatatttaagtggcataaattcatatctcaaataacgaccaatatgctttttttctactaattcagaattaaacattggttcaataatcgtttctaactctaaatagttatcttgaaacctcgaaccgtcttttttaatatgaataacaaaagtttttttaccacgtttataaaacatcgttggataatagtcatattcagtttgtttataatcaatagggatatactcggttgttttcttgattactgtacgattatgaaaaccttgtgtttcaatcatttcagctaaatcttttgttttaaaacgaattaaaagctgagcgataagcttacatataacaaatataattgctgtaccaattaataaatacaataaatgcggtttaaaatatgcaaacaacgtcaatatatccaattttttattaactgatttataatcaataaacaaaatatatatacgatataccaaaaaaataaatgctaatacacttgcaaacataaaatcaatatacttctgataaggctgtatacgtacgcctttaaataaagcaatttcattcattgccatcaaatccactcctttaaaataaaaagcacatacaattttgtatgtgctaaaaattacatcgcaaatttttcttcagctttagagcttgcagaatcttcttgtgttctaaatgcttcagtcatttcctcaaatggacaatgtacaaccatttttccaacacgtccataaaaatcactaaatatacattgacctttcttcaaatctttcaacatctccatattttcaggagattcttttgaatattctaagcctaaagattttaaaatatcctcacgttcatctttttcatcaaatgcaaaatgacaaccaaagttaccaccatcatcatctgctttatcttttaccgattgtgtaataaatacaagtgaattattctcagaacgtcccgttctttttatacgcttaccaacttttttaccttgtcttgaagcactaaaagcccaaccctcatcaataaatatagtcgtttgaacatctctacgagaaccgaatttctctaaaaacttaccaattaataacattaatgtaatcccatttttctcacttgttgaataacttgatgtatcatcatctgctttaggcatatctaaacctttaacctgtaaaatagttgctttttcttgaatatttaaagctggattcgtaccatcactaaaaacaagttttaaaatattgttttgcgttttttcaaataataaatcgcctgcattttttacatgttcatcttcattattctgtaatttttcaattacatttaatgaaccaacttttttaccattttcacgttcttcaaccgtatcagaaatagcttgataaattgctgtttcaatatgatgataattttcaaaagatttaatttcatcaaacactgatttcaacatctcattagcttcaataccatctaaaaatacaatagggtctagacaaccataattggttgaatcttcataattcaatgttacatatttaaatgtttttaaatgattaataaataggggatacttttcttgcatttccttactttctgttactctgtcaaaccattctgcaaactcagattttggatcccagtacaacatttgacctttaaaaaatgatgtataaatccataataattttgctaaaaatgatttacctttaccagtttgaccagtaattaaaacatgcggactatcactgacagcccccttaataccttttgcggccaacaataaactaaacaaaattatatcccttgaacttgcaacagcttcctcacgtgaaacagaacgtataaatttatcaatacgccctatataaaaacccgtttttgttcccaaactttgagacacaccaaataaattctctgctatacctgttgccgttgttctttgtaaccaatacttattaataaataaatcattaccatgtaaacactgataaaacaattgtaactggtcagctaatggattaactgcatatatttgagtttcctttaatcgtttcatcaaacgctttgctttacgtttacaatctctataatcatcacttttaattacaaacataaatacccactcaataaatacacctgagccagtcacttctcgttccatttgattcaatacaaacaaattatcttgaacatcttccgaagcactgtcgccagtatcttgcttttcttttgcttgttgtttatgatttattttcgcacggtcaaattttttcttaactttctcattattaatgatttttgcttttacatggcattcaaccggaaaaggcatattttgagctttctcaaataaatgtgtatattccatatctaacggaaaatcatcaacaacaactgttgttgtataaaatttctcgttatcattttcaacttctaaaacactcaagcgagtagggtcaattactgcattataaatatctgtaatagctcttcttgaagattcttcctgtacgtcatgtgttgcatttgaaataaaaggctttctaataatataagccaattcattctcagttaaacgctcgcctccaatacctagaaaactatcagccaaatctcgttcaaatgttttatacttatctaaaattttatcgtctaaattcacatcaaaaccaaaattcgaaacaatacgctcagccgtatctgataatgtactttttaaaatctctttaagtgtaactgcatcgtcagctaattcacgtattttaacacccataacaaaagaattatgcgtaatcatttgtaattcttgttctaatacgtcaatagtttcttttgaataatattcagctacattaaaagcttcatcatcaaaatctttactaatttctttaaatttatttcgcaaatctaaatcgtggtcatacatttcaaaatgaaaatcttgataacctttaatcgactctaaaaaataacgcatacgcttttttgattcttcttttgcatcataatttgctgttgatatagactcagaacgaacacgataatacgcccaaacttcgccagttttcgttaataacaaattatctcttaaacctgcatacggtgcttttaaattcatgtcatccctccaataaaaataaccccaataggggctatttaaatgttatttttttatcatgatattctacttcttcatcataacttaatttaacttttcttaactgcacattaaaaacaaatattacaaaatcccataagaagaaaaataatttctttccatcttgttttaacttaacaatatatttcgttatataataaggtgcaaccgtaaagtaaataaacataagtccaccaatcgatataattacaggctgtaataaataccaaaataacaaaaataatataaaccacacaatcaaaaatgtagcccaaaaatctaaacgaaaacccttattaatacgaaacttatctgtaaattcatacataactatcggttgttcaaaagttcgctttaaattataagcttttttatccaaatggaatcacctcaaccgccaaaaatcattttccaaacacctgcaatcgcattaaatacctgttcaggacctttagaaactaagaataaaaagccaccaacaacaaataatataaccatatgcccatatttaccactagcccattttacaataccaacaaccaatactactaaaccaatacccgtacctacttcattacttatccagtcaccaactccaccaagtgatggacggtcagcacctaaaacaaaaaaattaaataaaccactcataacattaacctccaatagaattagtcatatttttaacgtaatatttaccatctttttttgttatatctaatgtgtaatgctccaaattctccaaaggagaatctttatctttcatcaaaatttcaactttagcaacataatcatcgccttttggatataacctaatttctcttatctgagaaacttctctagttccttctaagccctcagggttatccattaaataggccatatcatcagacttactagaagcatatttattaaagaaatcttcaataaaagcttttgctttcggattgtcttcccgtttattgtctttcaaattatcctcaaccattttagctttattcaattgactatcagggattggcgtaaaataaggatattcaacaacaacatacttattattttcactcttaataggtatatttattaaaatgttttgatttactttacgttgcttttcttctgtttttgtttcatactcatctttatctttttcacttttctttttcttcttaactttaacttctttcttttcagtaatattcacatcataattaacaatatactgtataattgtttgtttatctttacgtttaatattataaaattctttactattcaattttcgttctgtatctgaaattttttcatcaggttttttataatctgatggaaaatatttcaacaattctttttctctagattccaattcttttgaatctttcgagatattcatatacgtatcaataaacttatcagcatataactttaatttaggactatactgaactgtattcgcattatcttcatactttttttgaatcatattcgttttattaactgcttctttactgtcattatttgctcttgtagctttaataaaagaagctaataaaagaattaacaaaatagctaataatgagtaaaaacaaattacaatcatcttacgacgatttttaaattttggaattactcggcgttgttctttaggaatatcaaaatgctttccgtttttagaaaatcgtgttaaaatgtacttgcttattattttcataaacgattttctaaaatcctttacgaaatttttaataaaaatcacatcccagttatttttttaacacttatcttttgataagtgctttttttgttttaaagcctccaaataatgattaattctattcgtatgctcatcattaaattgtgaatgcgctaaaattttatctaaaaaatcagtatctgtaagcaacccctcagattgcgccatactttcggcagttaacactgtatctaaagtagtagcaacttgtttacataaccaatcaagattatcctcaatggactttaatgttggtctagtagttaaattcaatttttcagtatctttaataaataacgcccaaggtctatataatggccaccgcttacgatttttatcatttccatctttaggaggagagataaaacgcaaattattatgcaatatagactttacaatttcgcttatattatctgttctactcaacactttcgcacaattaactgcatatgcctttcgcatttgtatttcataacgattccatagcccaatgtcttcgacatcacaatgacgtttaaacgcttgttcataattcttttcataaaaacgacaatataaattgctttgtttagaaccaatataaaaagtagcgcctttacttcttccgtctgacaaattaaaaccgtttattgcgcttccagctctaaaacgtgaaacacactcagctttttcagcctttttaattaataaaggaacttttaaatatgttttataatcatcaattgcaatatcaattcttgtaaaatttgcattaactgataaacatttgtcaaaaaaatcttgccaagttttattcaactgctgtaaatgatgttcaaactctctacaacctgtaccagttaactgtaagtgaatgcccattgattcatcatcacttgaataatacaatttaatgtttgaaaattcataaccgcgattataaaagtaaatgccactatttcgttttttgaacaacgttataggcaaaccgataacgtcctcaattactgctgaaataggggctatatggaaagtgacctgaacccagtcaacaactgcctccacagcacttttatttgtacgctctacccccctattagtaaggggggtacactggttttttaaagtcatatttatttatgcctcctatcaaatcgcaagcgatttgatacatgaccgttctcgcttttttaacgcgtatttgtcgcaggctccgcccaaatgcttaacgcactccgtgcttgcatttctgcgcctgcatacgctaaaagctacacggtcatgttaaatcactaatactatatgttaaacatcaatatcgccaatataaatacaatcttccaaattcacttgtagcattctgccatatcctgcttcactcaagctcatacacaatagacaaaggtcagcgtaaattttaggccgaccttttaccgtattttctttaacgtaactatcattaaatttagactgtatttctttagctaaagtcattaatgaaactttatcgccccaatttatacgactagcaacatagtttaaaataggttcactcaaatttgaactatttgtgtagcgatataatctatctgctgtataataatccatttacatcacctaattatttttgtttaagtgcactattagaaccaactactttaatatcttctgcattccagctatatgcgatagttccaaaatcgcctgacatttgaacatacattttaacgtctggttcaactaattcgcattcttgtaaatagtctaattccactttattaggcgttttaacagtgatttgttcgccttgttcttgactcgctaatttatatgcataaacagttttatcagtacgctctccattttcatatttatatttttcatctacacctaaaaagtttaattgtcctaaagtttttttaatatccaatactggtttcataatatatccatcctttacaaaatttttaataaaattaaacgacttctaaagggtcgcacgaataggaataactcccgcaaatccgtaccactgcatttttgataatggagtgtctatgcttctcctgacctatcatatttttaatcaaacctatcggttcatcacctcaaaaaattctaagtcttcaattgaaatatgatacatcttacaaataaatgtattagacacaccatattgttttaaaaatttataatccttataagtaaatcgataatcattcttttttgccatttcacaaacttctaatatacgaaaatatgcaaaattatacattttacaaatttttcttttagaaacaccatgaaatcttaaaattacaaatttacgataatttaattgatttgaaccatcaaaaaaaggtgtaaactcagtcataattatcaattcctttcataagaattaactgttaactagagtttacaccaccatttaaaatattttctgcgttcgtaacggcttgagtataagcagttttcttatctgaatcagcatcatgatagttttcacttgctagtgtatttgttttatcattaataccattttgcaagttagccatcgctgtattcaattgtgtactcgtattagatacagcttcaacaccagctacagttgttgcttgatcaattttagttgttaagtcacgtttttgtgcattattaattgacgttaagttatttaatgcatttttagctgcattcttcgcatttgtaacgttttgatcaccattcaatgcatttttagcacttgaaacattttgaatagccgcttcaacatcttgtttagacgtatttgcaccttgcgttttattcagaattgcttcagctctgcttaccgcatttgtatacgcatcacgtttagctttatctgcatcagtaaatttaacactttgtttaactgtgttttgatcatggatagcttgttccaagttacccatttgcgtattcaactcagttgctgcatttttagtagcagttacctcactcacatgacctgcacgatcaatttgtgatgagatggcagatttttggttatttgttaagtgtgataatgtatttaagttttgcttagcagtgttttgtgcatttcttaagttttcagcaccgtttaaaccatttttagcattattcacttgtgttgtagcttgggtaatcgcactagtatccatagtcggattgttagtttgattaatgatacctttcgcatttgacacagcgctattatatgttgattggttattcggacttgcgtctgtatagttttgacttgttttgactgttgtttcgttagcaatactatctcttaagcctttcattgcattgttcaatgcttgtccatttgtttgaacagtttgtacgtcttctaatctattggcttgtcccacttgttcttttaatttagctttttgaggtgtatttaattgtgttaatgcatcaatagcagtattggcgttttgttttgcttcacgtaatctttcgtcaccatttaattcttgtttcgcgctgtttacttgattagctgcagctgttacttctgaaggtgtcgtaacaaccgttggcgtaccgctaataatatgttcagcattggtaactttagttgtgtaagcattttgtttagtgctatcggcattaacatatttactgcttgctaacgtattcgtcttatctgcgatggcatgttttaatgtgcccattgccgtgttcagttcagtcgcattgtgctgtacatcttgtgcattagatacgcgttgagcaccattagcttgtgcttttaatgcatctttttgtttttgatttaaatcagatgcgccattgattgctgtaatcgctgcttgtttcgcattgtttaagttttgcgtaccatttaatgcatgtttcgcattattaacattattaagtgcttgttcgactgctgttttcgctgtattcggtccagtttgtttatttaaaatggtttcggctgctgatacagcttgattgtatgcattacgtttttgctcatcagcatccaagaagttttggctcgctaatgttcctgacttatcgttgatagccgtttgtaagttacccatagcaccatctaaactattcgcattttgtttaacagattcaacaccagctaagtttgtagcttgtgaaatttgatttgttaaatcattacgttgagctgtagtgatatgcgttaaagtacctaaatgttgtttcgctgcgttttgagctgcaattaattttgcatcaccattcaatgcatctttcgcattattaacacgttgtaatgctgcttcaactgcattttgcgcagtgtttggacctgtcgatttatttaaaatcgctttcgctgcagtaatagcattatcatactcttgttgtttatttgtatcagcatcacgatatttctcagatgatttcacttgagattcgttgttaataccattctgtaagctagccatagcttggtctagatgttgcgcattttgttttacagtatcaacaccactcactcttgtcgcactagtaatttgactaatcaaattgttcttttgagcatctgtaatacttgtcaatgtgtttaagtacgttttcgcattttgttttgcagcagctaagttttcatcaccgttaagtgccgttttagaactattcacttgctctgctttttgtgtaatcgtacttggattcatttctggattactattagcattaataatcgtttcagcagcagctactgcgttgttatatgctgtttgcttatcattattagcatctacgtaatcttcacttgctttagtcgcatctttgttggcaatactttgtcttaacgtattcatggcttgatctaatgtattggcatttgattgaaccgtttgaacaccagcgacagtagtaccactattaatttggtttgttaaattcgttttttgtgcagttgttaaatgcgtcatattatttaactgctgttttgctgtttgcttcgcttgatctaataaacgcgtaccatctaagttatttttagcagaattcacttgattcatcgcttcagtaacttgatctttcgttttattttgaccatttgatttatttaaaatatctttcgcagcttgtaccgcatttgtgtatgctgttttcttactaggtgtcgcatcttgatagttttgactattaagcgtcgtttgttcatcattgattgcaccttgcaagttacccatcgctgtatttaaatctgtaccttgttgtttaacagtatttacgccagcaatatttgatgcagcattaattttagatttaacatctgctttttgtgcattatttaaatgtggtaatgcatcaattgctcttgcagcatctgttttagattgtgctaatttttcataaccatttaatgcatttttattagaagtaacagctgaagttgcacgattaacatcatcaacagacatcgttggatttgttgtttgattaatgattgtttcggcacttgaaactgcactgttatatgcattttgtttagctgtatctgcatccgcataatcttctgtacgtttcacttgatctttatctgcaacagcttgtcttaagttacccattgcactattcaagtttgttgcattttgcttaattgtattaactgcatcaatttgatgcgcaccattaatttgcgattgtaagttttgacgttgtgcattatttaaattgtttaaatgacctaatgcagtattcgcttcttgtttcgcagcatttaacttagcttcaccattcaatgcatgttctttacttgtgacatttgataaagcattgttaacatcacttggtgttataactggatgttgtgcattaccattaataatgtcattcgcatggttgtatgcattgttgtaatcatttttcttattagtatctgcgttgacataattatcactttgtacgacttggttatgattagcaacgccacgttttaaacctgtcatagcagtatttaagctttgagtcgtttgtttaatatcatttactgcttgcacgttttgtgcactattcacttgttgtgttaatgcattcttttgtgcttggtttaaatcacttgcatgcgtaatcgcatttgttgcttctgttttcgcacgttgtaagttttgttgaccatctaaagcatctttcgtcgatttaacagatgctgctttttggttcactgtgttaacatccatcgttggattagtcgtttctccaatgacacctttagccgcattaactgcattatcatacgcttgtttattagctggtgttgcgtcagtgtaattttgatctgatttaattgtattattatccgcaacactgtcttttaatttcgtcatcgcagtatttaaagccgtaatgttagacttaattgtttcaagcgcagcatgattttgagcagcattaatttgttgcgtgaaattattttgttgtgcttggtttaagttagatgcaccatgtaatgttgttaacgctggctgtctatctaatgttaaaccttgacgtgctgtatttaattgatccttagcttggtttgcctctgtcactttatcattgatattttggacagttgggttgccattcaacacttgattaatttcagttaacttttgacgcgctgcttgtaatttttggttgtacgcatttaacgaagcggtcgtcatacctgttgtatccgttggttgattaatgctttgttctaattgcgttttcgcagtttgaagcggcgctttatctggtgttaaagcttgacgtgcatgatctaaatcagatttagcttgatttgctgtagacgtatttgtattaatttgttctacagtcggtgaacctgctaatacttgattgatttgttgaatcttattacgtgcagctgttaacttcgcattgtatgcatttatagagtcttgtgtcataccagttgtacttgtttgcgtgtcaatactatgttgtagttgatttttcgcattttctaaaggcgctttatcgactgttaagccattacgtgcttgatcaagtgctgatttagcggcattcgctgctgtcacgttttgacgtattgtcgcaacatctggatgtgaggctaatacacgatcaatttcttgaattttagttctagctgctgaaagtttttcattaaatgctgcaatagatgcgcttgtcataccagtcgtactcgttggctgatcaatatcattttgcaactgagtttttgcagtttgtaatggtgccaagtctggagttaatccagcaattgcttgttttaagctattatatttttcttctacttttgttttttctgcggcaatttgttggtcagtcgcatcaccattgttaataacattttgtgcatttgttgattctgtttgacccgcacgtttagcattttcatatgcttggattgatgattgtgtcataccatcagtagttactgatttattgatttcttcatcaagtttcgtcttagcagtttttaaagcactattatcagctaaaggtactaattgattaattgcttgcgttaatcgctcattgacacgatttacatttgttaacgcagattgcacttcttgtactgttcttattggcttttgaataatagcattagcgctatttttagcacttgttaagtcactttgaagtgcacgaatcgaattattgtaagcagtaatacttgccggcttcttaccagtcgttgtacctgtgcgattcaattgttgcactgcttgctctaaggcatgtgtatctgcagttaaatcatgtttcgcttggtttaatgctgttaatgcgttatcgacacgatgtttttcatctgaaatttgttgtgcagttgcatcgccattgtcaataacacgttgagctgcagttatttcagtttctgcttcacgcttcttcgcattatagttatcaatactttgttgcgtcataccagcagttgatggtacttggttcacagaactttgtaagttatttttagacgttactaattggctattatcttctttattttgaagtaatgctttagcttgatcaatcttagtttgtgctgcacgaactttagttagtgcgtcagaaacttgttgtggtgttgcacgctcattattaatcacttgttgtgcttctgttttcgcagtattgatttgttgttgcgcattatgcattgcattattgtactgcgtaattgtacctggctttttaccttcagtgcttactggatcatctaaatgatttttagctgtgattaactcacgtttatccgcttttgtgaaaatggactcttgtacttcttcagtactaccatcattgtaagttactgtcacaggaatcgtcgttgtgctaccaccagctaaattagtaggcattgctgtgccatttttaatcgttgcagtacgtttattagcaacttgaactgcattgttaatttcagctgctgttacatttgaaccataatctttcacaatttcagttgtgttgacagtatgagctgccggtgcagttaatgtacttggattactacttactgagtgacctgtacctgctttcggagtaattgtgattgatgaatttggttttatagtattggcattgaacgtcactttaccagtttgtgcatctaacgttacatagtcaggcttattcgcaattgtccattgattattttgaccacgaacaacattaattgtcttactatgttctgcaccattatccactttttcagtgtaagcaatatccattgcttgagttggattaattaaatgtcctgatggattattaggcgtgatatcaatatgaccattttgccaaatcttagtagtcgcttggttcggttgtggtgcgacaactgtgaaatcatcactacgttgctcatcactcactgtctctccgcttccttgcgttgcaacaacttgaattgtatcagcagggttgaaagtacctgctgcaacagtaataccattattagttccagcaatacctgctacagttgctgcagatgcttctttcacccatggactcgtattattgcgacgtgtaaatgtcgtcacaacgttaccattacgtttaataactaatttatcagcgtatgtcgttacgttaccggcatgtgtattcactgtttggtttgctccaggtgcaattgtaatcgctcctgccgctgtttcagtcacagttggtttcgctggttgcacatcttttactacaaatttcgctggtaaagatgttgcaaaagtatgtccgttatagatgacgtcatattttgcgttaacgactttagccacattcggtttattcatagctgaccagtttgcgtcatttgtacctgtagtatcacgattccatttatacgtaaatccatctgttggtaaaccagtagcattttgcatatgtgcatatcctgatgcttgcgtaccacttgctaaagtgcctccaaccgttgtcgtataagtagtttgagggaattcaaattgatatacattaacagtaacaggaactcgtttagcagctgaaatacctggatatgtgacatcgacatttaaatgttgcacgcctgcttgttggttatttggttgttgtctatttgcccatgctgcagtgataccatttgtgtttgtatttggatcaaatgtaatgtagttcatcgcatccgttccattagtcaaattttgacctttcacatcacgtgatggcgcctttgcattagcaactggataaactttgactggaacttcaacattacgcgtaccttgaccattaggtaatgttacaaccgcagttttatgagtgttaccgactgtattcttccatgtatctggactatcatgccatgcaaccgttgccccatgtggcgggttttgaataaatctttctacgtgtccgaaatcaaaaccgtcgccacctttaataaatacagcgccttcagtagttgcttgtaattgtggtgtcactgttactgttgcactgtcatttgaatcaacagattcatttcttgttactgtaacaacttgaccatgttcgtcttgcgtcgtatacgtcacattgttcattgaaattgaagattttgctttaattccgccatttggtaacgcgtcacttactgtcacaaccgaactaaaaccgctaccatgagtaatatttgtgacatttaatggtgtattatctgctttaaataattttactgacgagttatttaatacgttattaactttaatttcttggtttgtaagacctgctttatatgtcacagagtttgcgtcaattctaggtgggtcaggtttaactttagataaaatagttaaatcttctgtttgtctattatcatatgtcactctaataagacgagtagatatgcctacaacatctttgttaggaccatatgttccaacaaattggaaattcatatgttgcgcatttgtcgaccaagaattatttactggcttaacatattgtttcgcatcatacatatctgaaacacctgggtataaaacacctctggctgtttcaaagacatgtttcggtacagttcttactactttatatgttgctgttttcgtaatcggcgttgtttcgccatcaattaagatatgtgcagttacagttatatcttcaccaatacgtgtattatctttatttggcgcttgtccacttacccatgtaatagttgcatctgcaatgtcactaccattagataacttaaagtaatctgatgcactagaaccattacctgctgggaagtcttggccttgtacagtgtaatgcgaatgtgcaacgatttctggaatgacatgctttacaggtacagtcactgttgatgttgttccatcttgataagtaacagttactgtgacattggcattatttccagtacgactgacattactaactgttttactagtgatttcattcgcacttgctcttgcataacttctatttggtactgtttcagtaaacgttaacgaattaataattgtcgtttgatcagcttgtgatactgtcgcattattcgaaatattggcaattctcacaggattagcagccgttgatgaagtaccaactcgatatttatcacgcaaaggtttcactgttacattgaacgaagttgtagctgtattgccgcttgtatcagttgctaataaattgattgtcttattagttgctgatgtcacatttggtgccgttgcagaaacatgttgatggttattatcaacagtacctgtaatttgtgatgtatttggtacagttacagattgcacaccaaagttatcattcgctgtaatagtatttgtaaatgtttcacctgagaacacttgatgattagtgtaattacctactgaaattgttggattcactaagtcacttggtacaaaataaatgttaatagcgtcagtagtatttcctgtattttgatttaaatgttcaacatattgttttggaccatatggcgttaagtataactgtgctttataaactgcatcacttgcattatgtgtagaattactttttacaacgtggtcaattgtaaatgcgccagcaccattagctgccggttcgtttacgttaacaacagttgagttactatggtttgcacgagtatttgaatttgtaacaggttgcccaccataaccgtttgaagggttgatgatgtctaacacttgaatcacttgaccattcaacgtaaattgacgttgaccatcagttgtcgcatttgattgtgaataaccagtcgttctaaagttaggtcttccgccagcttctgcttgtgatttttcattaccagtaatgttatttcgcaatccaggcactgtagttgttgcttttaacattgttaaaatatcattcgtcgtaatttgagtacctaatgtagcatcataacgataaattaaagatttatggtcatcagaccatgataaaccaccatctgttggtctgtttgcaatttttgcattcgtccatgtcactgtataatcttgtgggaaattaacccaacgcaagaaattcatattagctaggtttgacgcgaatgatttcgttaatcgacctttattaatatttactgtaatagtacttacattagcaccattaggtgtatttgtaactgaaatatcaccttcggcaagcgtaattacatctctatttgcattaataaatgcttgttttacttttgagatttcatcagtagttaaatcatatgttgatgtacgatatacacgttgatcgccttctggttgtttcacatcgatgattttcaaactaatatagaagtcttcactatctttatgatacgcatttgtagcagttatatggtataactgcgtgcctgcgttcatttgactaacttcttgtgcagttggaatagttctatcagatgtaatatttgtaaatgtgccacttggaataggttgtccattacttaaagtaaaatattgtttaatatcaccaatactaaatgattgtcctttagcaatcgttaccgttgctgttttagcagcattgacagtttggtattcaggtttcacaactggttcgtatgtcatcacatttgtagcatcaagcgttgtcgatgagccatcacggtaatgtaatgtgacattaccattattatcgacagttactggatcagttgatgctaaatatcctcttatattttggtttttattcataaaggcagtaattatgctttgcttttcatcattagatacagcagtcggattgactactacaactttctcagtatttcctaatacaatcggatgagcatcttcactaattttacctacatgaattgaaacatgtttagattgactatcatttgtcgtattattgacattgtctgtcgctgacactttaaatgtaatatcactgttaaatgcctgattcatactcactctacctgtaatagataatgagccattattcttatccgcttttgttaaatttgatgtccaaccattcggcaatgtcgtaatagttgtattttttataccagaatgtctatcagagacacccattgtaaagttgacttcgtcgcctcgatagtatttggcatttattccaacaggattattgattgttggtggaatgtcatctggcaaaatagtaacagcattactcatattagatgcaactactttattataataaactactgctctaatttgtttacctacaggtggtatgaatacaacataatcttgcggtcgtatagtaattgtattatgcaccccatcaggtgtaccagtcgcaagtatcgtataaccagatggtatttgatctgcctcactaccaccattcgtagtttgatttgttggtgcaactaaataaaccaatgccgatggatccaacggtattcccgaaatattaacaggcactttttgtaatgctgtacctcttaattgctcagctgtcgttgtaattgttggtgtatgtggtttaacacgaatttcgaataattgttctttacgtccaaaacgtatcgttccaaagtaatcccctggtaataagttaccaacaagttcaatattgcgttctctggcattattaggtctatttgtcgagttttcaatgtgtaatgtacgcggaatacctgtaatttgccaatctttatctgtaaaattctcattacttgttaaattaatacgtaatggttgaatagatgttacgctaccacctaaattcacggaagcattcccttggttacctgcatatacatagaaaactggatgcccagcttgttttgaaaatggtttttcagcaatattttgagtatcgtcatttttaaagaatttaatattatgttggatttcaggtaataccgttaagttaacaggaactaaagtttcactattaccataagcatcaggatagtcgaaaccaatcattaatcttattgggtttctagttcttgctgcttcttgtaatttttgatcagtaaataattgacttaattgatattcatttaattgttgggctccacccggtctaaaagcattagtatttgcattattcgaataaaatcctaacactttattactcggcgtcttaacataacttaaaggatcatcaacaaaatcatctatatttaggtttgtactttctaatacctttttcgtttgtacatttccttgactcacttctacacgtttagttgtacctatgcgatatgtacgattaaccacttgtcttaaaccattaagacgttgttgatggtcttgcgttgattcgacgtatagttgactgtacataaataattgattgtactctaaagcacgcccacctgctgcatagtacaatttattaacagttggaccttgtgttttaaatgaaattgtataacttgcatcaccttgaccgatgaaagtataaactttaggaacacccggtgattcagcaggtttttgaccattaatatattcaaaattttgtctaccaaaagctttagtagcaggtgtcgctccagcttcactaaaataatcactcgctctagataaatcttctaaagaataaatatggacagttggccagtcatatattacttggccacttctatttcttattttaaagtcatgtgaacgatgaggatcatttactccatattcccacatttgttgaagtggtttatttgcacctgctcctgctccatgactccattgtacatttgttccatctgaattaactgttacaaagtcagttcttcctactggcacttggtctgctggtaatgcaaaccaaaagatcatattttgatgtggagcatgtcctttattaaacttaataacccattggtacccgtctccagtttgtttcgctgtcataagagcaatttcctttgagtcagaggccttcaatgtattccatggtgtagttggtaaattatatggcgcccctttactagaagcattgatatatgtaccaacaggatagcccgaaccatcattagcattttcaacataatatgatgaatttgcattttgatagtctgatactgatctaggctctgcagctcttgactcaaccgaacgcgtttgaattctatttgaacgtcggctagtctgttgacgttgaggcattgtacgaattaaagcaacagcttgttccaattctttgtatgcaagttgcaagtctttattgtttattggatcattactgcctaataacgtattaatcttatcaaaaatgccttttacatagttaaatgtgccagaatctgcattttcacggtcaataaagcgataatcatgataatttgcatcaaaaaacgcttgtaattcatttcggtcatgttgtacgttaccattatcagatgaatctgaagctgttactacatttgcttcatgattttctacatgagccgctctattgtcgtttccatttttattagcagattgactttcgttttgtttatgcttactttgttctttatctggttgtgttgtcgcagccgttgccgaatctttctttgtatttacattttgagatgctggttgttcatcattagtagtagatgattgcgctactttttgatctactaaattagcttgactaatatttggttgctcattttcatgagtagcagataatgattgaccattttgtgaattttgagaattttgtacttgagattctcgattctcagtctgttcattattactttgttgtttctgtttaaccacgcttgctggttgatttgtttcagcagcatgtgcttgtgatgtattgaatcctaaaaataccaatgtcgcaatgacagttgaaaatgtaccaactgtatatttacgaatactaaacttttgaattttatcacgataattcacagctattgttcactccttatcttgttgttatgtctctgttgtgttgtgaatgtatttacttttgattgcttgtgtattgtaatgctcattccattctcatttaaaaatttaaaacgatgacgattcaatgcaatttcgcaatctatccaaaaagtattgaaacacattacaactatgtgttgaacaatttatttatgctccagaatataataatacaaaatatattgtaaggtaaattgaatttgtgacaatttataataattataaataaagtagcgtaaaagagtaataaaaaaccaatccctatgttcatttaaaataatgacacataagaatcggtttatatttttgtttaatattgtagcgacttgtatgatttcaatttaattctcaattatcataattgagtatcgttttgtttaggcacaagtaacaaaatgataacgaatgataatattcccatacctgcatttaaccataatgcaatcattgcacctgtataaatgtttgtcatatttgatacgattgcatatactgcaccactcaatgcgacgccaaatgctccacctaatgcagaagccattttatagatacctgcagcaacgcctactttttctaacggtgcatttgcaattgctgtatctgttgatggtgtagcatatatccctagtcctaaaccaaagaataaataacctataatacaacaaatgacatagaatatttctggcaagaaagttaatgaaatgagacattctccgacaataagaactcctgttccaattaacattggtttcttgcatccgagtgtttgaagtaacttttcaccaacacgaatcataattagtaccattactaaataagtgattgataaacttcctgcttgcaatgaagaatatcctaaacctctttgaacaaatgtgttggctactattaatgttcctgcaacaccatttaacaaaaagtttgaagctgttgcacctgtgtaagctttatttttaaataatttaaaatcgattaaaggatttgtagcacgcttttcaagaactataaataaactaaaagatccaattgcaatagctaataaagtaataaaaagaagtgaggttacacctaattctgatcctttagtaattaaaatatttaaactgaggagcataatgactaaaagaaccagacctttaatgtcaaatttatttagagaaatcgatttagatttagtttcaggtgtgcctttaataagaaacagtgcaattaatgaaattataattgataggatgaaaatccaacgccaacctaaaagcgttgcaactgcacctccaaaaaatgaacaaacaccagagccgccccatgagccaattgaccaataacttaaagcgcgttgtctatctttcccaatgtaatatgacttaataatagacaaagttgcaggcataatacatgctgctgaaagtccttgaattaatcttcctataataagtaataaaggaatatttgaaataatgattaataatgaacctaatatatttaagataataccaatgttcgtgagtttaattctgccatatttatcagcaagaccacctgctcctactacaaacattcctgaaaataaagcagttatactaacggcgatattaaccgttccaatatctgtattgaaactatcttcaagtattggtacaacattaaccaatgattgtgcaaatagccaaaacgttattacacttagaacaattcctattaacaacttattattgccttcaaatgcctctcttgacggcttttccatctctatttgcctccctatacttttgaaaaacagacaaattccataacagaaatttgtctgttccatagaataattgaatggtttttgattttaatgtgtaaaactttaaatttattagtagtccatccatttattctcaatgctagttatcttaccttatgctgctttttgtttctttttatagtaataaactggtataccaagtgctgttattagaattccaatgattgctaatataaattgtgtaaacagtgtattaattaatacaaatgatcctgccaaaatagcaattaaaggtatgatcggatataacggtactttatatggtcgttccatatttggttcacgttttcttaaaattattaccgcaacaaatgacatacaatagaacaaccaaataacaaagatcaacatatttgtaattgtatcaaatgctcccattgacatcatgatgatagcgattataagttgtataattgcgccaaaccatggtgcgccagattttgttaattttgcgaataaatggctaaatggcaataattttctttcagccattgcatatggtacgcgcataccagtcatagtatagccattgatcgtaccataaacagaaattaatataccgattgtaataatcttaccgccattttcaccaaataatatttttgatgtatctgaagctgcatttaaattaccagcaagtagttctattggcaacgttaataagaatgtagcgttaattaataaatacacagccataatacaaccgataccaactgaaatcgctaaaggtaaatcgcgtttaggatttttaagttcccccgcaacatttcctacatgaatccaaccatcatatgcaaacatagttgctaataaaccactaccaattgctgtaaagaagccatttcctgaattacctgtagttggaattaatgaaaaagtgatatctccagattgaaaaataccaaaaattacaataacgatgattggaatcagtttaattactaaagtaactgattgtaaaattccgcctgcttttgaacctaggaaatttatcaacacaatagataacgcagatgcgattgctattggtattaacgaacctatagataaatggaataaattaattagctgtgtcgcaaatacgatagacaatgctgctacgttagctggaaaataaataaatgattgcgcccaacctgataggaagccccagaaatcaccgtatgtatattctatatacttcgttaagccacctgtttcagggattgcagcagcaagttctgctgctgttaaccccgcacaaatggtaatgatgccgcctaggaaccatacaaacaaggccattcctgctgttcctgttacttctgttacgtttgatattttaaagaatactcctgaaccaataactgtccccataacaatagcaaacgctgagaagaaacctatatttttttgtaattctttaccatttgacataattacacctcatttttaagattaaatgttttaacctaccacacccttgcttgtatctgcaatattcagtccatgttcaatgacacctgaaactctagttaagtcaacattcccgcctgaaactaatgcaacaacatttttatcttcaagccatttattgtttatttttccacttaaaattgcagctgttggtaatgcgcctgcaccttcagtaataattttggcacgctgcattaaatctttcatagcatgttcaatttcttcttcagtaacaagaataaattcatctactaaatgtttaactacttcatatgtttgttcaccaggaacttttacatcacaaccatctgctattgtgctatccactcgatgttcagttaaatctctcttatagaaagactcagccataccatgaacattctcagattgaacaccgataatatgaattgaagggttaaatgattttaatgcggtggcaatacctgcaattaatcctccaccgccaactggtacgatgactgtattcacattccaaatatcatctaaaatttctaaaccaattgttccttggcctgccattacaaacttatcgtcatatggatgaacgattgtcatgccattttctttcgctaattcttccatataaagtctagtttcgttaaagtttttaccttttaaaataacctttgccccatagccttttgttgcttgttgtttcgcttgtggtgctgtttcaggcattacaatcgttgcatcaatgcctaataatttagctgttaaagcaacaccttgtgcatggttcccagcagatgctgcgataatgcctttttctttttgttcatctgttaagtgattaattttattgctagcgcctctaaatttaaaagatcctgtgaattgcatattttctaattttagaaatacattccctttagttatactttggcttaaatacattgatttaattagaggtgttcgacgaataaatggtttaatgcttgctttagcttcttcgatatctcctaaacttacaatatgtgctgtttgtaatgtaactgtgttggttgtcataataattacatccttccgttttgtaaatttttagtccaaactataatgctatatttaaaatattcatttcactcaatttcatttaaattactatctattcgataacatttaatatttctttataatctaggtcatgtgatgaagctaatccttgatttgtcacttgtccttggtaaatgtttacaccagtacttaaggcttcattatctttaattgcttgttctaagcctttgtcacaaatttctaatatataatcaatatttccttgtgctaatgccattgttgaagttcttgggactgctcctggttgatttggtacaccataatgaatcacaccttcttcttcatacactggatcagaaattgtagttggtctaattgtttcaatagttccaccttggtcaatagctatatcgattaatactgaaccttttttcattgatttaaccatctcacgagtaaccaattttggcggtttcgcacctggaattaaaattgtagaaataaatacatctgctttcttaatttgttctgctaaattttctggtgttgatttgactactgtgacatctttttctgcatacatatcttcaagatatttaatgcggtcatcgtttaactcgataatgattactttagcatttagtcccaaggcaacatttgctgcatttgttgctgctactccaccaccgaaaatcacatatgtactaccaggtatatccacattttcatgtacaccagtcactaaagtaccttgaccaccatgttgtgcttcagagtagtaagctcccataattgctgagcgttgacctgctatagcactcattggcgctaataattctgcttttccattttttataatggtttcaccactaatcgcagttacaccaacttcttgcattttttctactatttcttttgaagatgctagatgtaaaaatccccagataatttgattctttttgaaatattgatattcgctttcatgaggttcttttactttgataacaagatcagcttcccatgcttgttcgtgagttacgatcttagcgccttctttttcatacatatcgttagaaaatcctgaaccaatgccagcatttttttcaacaattactttatgtcctgcatccgttaacttacgcacattttcgggtgtgcaagctacacgtccttcaccttgttttaattctttgactactgcaactaacatttgcaacactcctctttcatttgtgaataatttcacaattattttatcctttggttatgaatatgtaaataccattaattaattattcatattttatctataatttgttaataaatatttaatatattattcttattcttaaatattatgtgcaattataccactatatttatttcttatactccatttgatttatagttgtattaatacattgactcaaaaactaattaatcaaatatgttttttagattaataaagttgtaactgtactattttgtagtgtatggtaatttatttggatgaaatataattctttatactctattgattaatcaaatatgtatctatcaaaattcggcttatttattcactctgacatatccaaatacgcaaaaagactatttctaccttgtatcgatagaaatagtctttttatacttaattggtttaatttttcataaaatcttatactttttaaaaatgggatgaaatatattttcctgaaacatgtaattcatgttcgttacaaattgataaaatatgattaagcgttgttgcaaatgacattttctcaaaaagcgcttcactatcaattggtacttgtgtgtgaatttcagccagtcgcttcgataaatatagttcatctaaattgtcattaatcttattacgttgcccagctgataatgcatcaatgttttcaaccacattttcaacgctttgatattgctgaattaacttaatagccgttttctcgccaatacctttaacacccgcatatccatctgctgtatcacccataaacgctttaatatcgattagttgttgtggttcaagggcatattcttcgttaaaacgatgtaatgtatatctattataaatgttaaaaccttttttaattagccaaacttcaacattgtcattaatacattgcagtaaatctttgtcgcccgtaataatatagacatcgttatcagttgaatattgttgtgctaatgtacctataacatcatccgcttcatagtttttaacgccaatatttacaaagccaaattgctctgaaatttctttaacataatcaaattgtggtatcaattcttctggtggtgcagaacgattttgcttataaccatcaaacatatcatttctaaaagttgattgtcccatatcccaacatacagctacatgtgtagggcgtatttcatgtattgccgaaaagatatgacgcacaaatccttgtattccatttgtaggttcaccttgtgaattgtacataaattgtttatgaagacttgtagcatagaaatgtctaaataatagcgccataccatctacaagtaatattttattaggcatttaaaacgttccttctttcttaatataaaatagttttcagttgttgatgtttatctttcaattgattgataagtgttgtatctaaatcaaatgctaataaatcgtttatttgcgtttgaatattagcttcaaaactttcaaattgcgattcagcttctacagccatttgctttacatataattcaagctgttgcctcaataatcccatttgtggttgtaataatcctaacgtactttgacaaattgattcatgtatatctctttgcccatttggattcaaaattttacgttttgttaattgtttaggcaatgcatttagcatatcgttgaaatcgatgtgcaataatggttgctctatattagctgattcaaagttaaactgaggattaataatgacatgtaaatctgctaattgttgaacgattggtgcaatttgctcagtgagttgcttattaaagtatttttttatacgttctgtaattaaagattgctctaaaaacaatcgttgatgaatttgatctaagtatactctcgtagacactttcttttcttcattaaaatcactattttgcgtcatttgagaattaaacactgatttaacatcgtcaagtagttgtagttttaaacgggcatttaaatgataaacttgttcttcaacttcgttgtctgtatgttgtaacgtcgcatcaattaattgatgttgtaaacgctgtttatctttataatctgttaacctttgttggcgacgtgaaatatcagctttatttgtttcaaattctgtaatcatctctacataagaacgatccatttgttgaagctgatgaatcatttgttgttctaaaattgatttagattcaacatcaacaaattgttgtatgctttgttttaattgatcaatgcccttatcttcagcttgcaatgcatttcgacttgatacagcaaaaatgtctgattgtaagtgtacttgtcttaatgcatctgatacatatgtttcaactgcttcaagatcatcttgactttctgctaaatcagcagcattaattaccattttaaatgcttggttttcattcaactggttcatatctttcatgtgttctataaacgctttgtcattatcagtaaatgaatgattaaaataacttacatacaatattaagtctgaagaagttaaaatttgttcggtttcatttgtatgcctttggttatttgagtgtagccctaatgaatcaacaattattttaccttttaaccaatcatgcattaatgcaatgtgtactgtcttaacaaatgttgcatattcatcttctgcactccactttttcaattcctgttgattaatggcatgtttttctccattttccaacatattgacatacaatttataatgtttttcaactgcctgaataaaagcgagttgatttttatttaaatgtgattttaacttttctaaatctgaattaataaagtcttctatagtcgaataagacatatcttggtattcaactactgcattaatttcatctaataattgcgattgtgattttagcgttatataactctcgtctccataagatatttctgtagtagctgctgtagtaggatttggagaactgactaaaatatgctcgcctaataatgcatttatcaaactacttttaccagcactaaatgttccaaatacacctatttttattaatttattatctatacgtgttaatgtttcgtggatatcttgctttgtacgcttgaacaaaggcacatccgaaattatatcaagcgctttttgaatatctatagacatatttgttgtagctgtattttgatttagctgctgattatcacgattatcctgagcattatcagtagccacttgatatgttgtctcttgtcgacctattaatttatctagagattcatctaaatgaatatagtagtgacgataattcttagtcgtcaatgactgacgcagctcatttaattctgtataacgttgatattcttttaaatcatcactttcttctgttggtaattcatctgcctgcacattttctattatttctttaaaaattggtgttgattgttgttcaacatatttcttaatggctttaaccacttcgtctgaaaatgtaagtacataagtattgctgattgatgtttgtggttgatataaaccttcaatcatttctggcttaacgtcataatgctgatttaatactttatctgaagcttcttttttattgataaaacgcgtaacaaatgacatatcttctcgcattggttgacgaatttgttgattaacatgttcttgtaacgcatctgtcgctgttaataatcgctgttgttgaatttgtagttttttcttctttttattaaaaaatccgccaacattaaagtcttgagacatactttccaaataacttcgtaacatttctctcatattatgcggcataatgtatgcattttctaaaatatttttacgcttattctttaaaaatgccattaattcatctggattatttaaaagttgtgcctcttcactaattgcttgatgttgttgactatttaaaaatgcttgttcaaactccgcttcttcgatacctaaatcttctagtacttcctgaatttcagactgaatgtaatctagctgagcttcggtaatgtattcaaccgttcttgatgtataatcctctattgtctctctatgttgatctaatgaaattagataacttgataatacttcaagttcattttcagggtgatcaaatttagatacataaaaggtgcgttctaatttaataccccaatctgcaattgatttttcaactcgagatttaaacgtagagaatgacaattcatcgtcttgatgcttgtcaatttgattaatgataaacacaacaggtattccaacatcatttatatgcttcataaacttaaagttaagttcagattgaacgtggttatagtcaaccgtataaaatatcatattacttgtatacatatattgttctgttattgactgatgtgatgcaacatttgaatcaacacctggtgtatcttgcaacgtaaacccattttcaaatttagctgattgaaaattaatttctacagattcaacgtcgacattttggcgattcatttcccttacttcatcataattagataatttggcatacgtttgattcggcaaattagcaataatatcgtgattgtctgaaactgacacaatagcagtattacttgtcgttggtacaggtgaacttggtaagatatcttgttcaattaataaatttatcagtgtcgatttacctgcagaaaaatgtccaacgaacgaacatgtatattgctgcaaatatactttcttaattacttggttaattgtatgtaaaagtgcttcatttcgcgacttttcaacttctttttttaatttatataaaagatctaattgttctttattaatcatgttactttcccctttggttcgttcacatagaaatgcttgcttgttacaacgaattcatacaatatcgatgtccatttaaacatagatcgttaaatggctcgcattgtattatgtttaaattttatcatagctgcttgataaaacatacgaataatcaattttcttcaaacattccaacttaaaagttcatttttctaaaaatcacaaatcatcgttaaatttttctagaaaataaatattgtcacagtttgttcacacacatcacagaattgacaccgtataatagccaattgggagggaaatatgaaaaatacatttaatccattacaaagattacatttctatgcagcaatatttattgctccactgttaatcactttaaccatttcgggcattggttacttgttctttccagaagttgaaaataatatttataagaatgagttttttggtgacagtgatgtaaaaacgcatcaaacattaaatgatgcagtacatcaagttgaacaacaatatgaaggattctttgtaagtaaagttagcatacttgatgaaccatataacaaacgaattacactgagtgatatggcaggaaatcaacgttacgtctttctagatcataacaatcaatttgttgcagatcaaaatgcgaaacatacgtattctaatgtgatgcgaagtatacatagttctttgtttactgaaaatactattattaattatttagtagagttaaccgcatgttggatgatattcatgattttatctggtacttatttactcattaagaagcatttaatttctaacaaaagtaaggcacttcgttggcaaaagtggcacgcaatgattggagttatcattgcaattccagtatttgtattagtcttaactggattgccatggtctggttttatgggcagtaaaattgccggtatgatggacacaaacggtgaccttggtcaaggtgaattagcgattaatccacctaaatcagatttgaacgaattaccttgggctacacgtaaaaataaacagccagcttcatccgaaaaaggttcaagtggtcatcatggtaatgcagcaatgcctcaaaccaaattagattatcaaatatctattgataaggtcgttgaacaggcgcaaaaagctggtattaaaaagccgttttcaatcgtatatccaagtgataaaaatggtacctttattgtatctaatactagtaattcaggtgttactgggctagatgtatcaccatacaaggaacaaacactttatttcgatcaatatagcggtaaaaagctaggtacgattaaatatgatgactacggtattattgctaaatggtttacatggggcattccgcttcacgaaggtcatttattctgcattttaaataaaatcattaatttatttgtatgtatcgctttattagtagccattggcatggggtttgtctcttggataaagcgtacaaaaaatactgcagtaaaagtaccacatcgcgtaaaaaaaccagcatctatatcactcataatatgtttaattgtattaggattattaatgccattatttggattatcacttatccttgtatttataattgaattaatattatatattaaagatcgtcgtgctaaacaataatgcacttaaagttttgaactgacgaaatttacaaaatgattctcgtctctctaattacttaaaacgggttctataataaatcgtactgatggaaagtttttactttttatctgtccgattttttgaatttgaagataaaaaagcatctaaaacgcataagaagataactctacttcttcaaaattacgttatagatgcttttttattaattcatatgcatgtcgtgaattttcatcattaaaccgtgtgggacgtcatcatgtttaacaatctcttgtttataaaatgtcttcccatcatctttagaaactaattttacaaagtctccttttttcggcttgaaatcattagatggttctactttgatattatgtttgactaatccatctttttcactgacaactttttctgcatttgtattactattcatataaccaaaataagtcgttttttgactagaaaaaatcattaaacatacaacggcaataccaataacaaccaatgcaatagataaacctagacccatttttttacccatttatagactccttcatttttcaaaaatacctattatcatgagaacttaattattactaattttagtcacgcattagaaacactttagttttcaatagttttacgttctgtctttttaccccagtattgataataagtacattctatatatccattaaataacttacgtcgctttgttgctttacgatctactaaatattcaaattctttattacttgttaaaatgtatgtagataaaaatggatgttgtttcattagtttaccaatataacggtacatttcttcaacttcttcacgatcaccaatacgttcaccatatggaggatttccaattaacgccaccggttcttctgtatcaattgttaatgtattgacatcttttacactaaatttaataatatcagacaacccaacttcttcagcgttacgcttagcaatctctaccatttctggatcgatatcagaagcatatacttcgatttctttatcataatcagccatcttatccgcttcatcacggtaatcatcataaatatttgctggcatgatgttccattgctctgatacgaactcgcgattaaaaccaggtgcgatattttgagcaattaaacaagcttctatagctattgttcccgaaccgcaaaatggatcaattaaaggtgtatcacctttccagtttgcaagacggattaaacttgctgccaacgtttctttaattggtgcttcaccttgtgctaatctataaccacgtctgttcaaaccagaacctgatgtgtcgatagtcaataatacattatcttttaaaatggcaacttcaacagggtatttggcacctgattcatttaaccaacctttttcgttatatgcgcgacgtaatcgttcaacaatagctttcttagttatcgcctgacaatctggcacactatgtagtgttgatttaacgcttctaccttgaactgggaagttaccctctttatcaattatagattcccaagggagcgctttggtttgttcgaataattcgtcaaacgttgttgcgttaaaacgtccaacaacaattttgattcggtctgctgtgcgcaaccataaatttgcctttacaattgcacttgcgtctccttcaaaaaatatacgaccattttcaacatttgtttcatagcctaattcttgaatttccctagcaacaacagcttctaatcccatcggacaaactgcaagtaattgaaacatatatgattctccttttatacaggtattttattcttagcttgtgttttttatacatttccaacaaatttaatcgctgatacattaacgcatccgcttactattttaaaacaaggcagtgtcattatatcaagacaaggcgttaattttaagtgttcttttcatgaaaaaagctctccatcatctaggagagctaaactagtagtgatatttctataagccatgttctgttccatcgtactcatcacgtgcactagtcacactggtactcaggtgataaccatctgtctacaccacttcatttcgcgaagtgtgtctcgtttatacgttgaattccgttaaacaagtgctcctaccaaatttggattgctcactcgaggggtttaccgcgttccaccttttatatttctataaaagctacgtcactgtggcactttcaaattactctatccatatcgaaagacttaggatatttcattgccgtcaaattaatgccttgatttattgtttcatcaagcacgaacactacaatcatctcagactgtgtgagcatggactttcctctatataatatagcgattacccaaaatatcacttttaaaattataacatagtcattattagtaagacagttaaacttttgtatttagtaattatttaccaaatacagctttttctaagtttgaaatacgttttaaaatatctacattatttgaagatgtatttgttgttgtattattcgaagaaaaacttttattgtcctgaggtcttgatgttgctacacgtagtcttaattcttctaattcttttttaagtttatgattctcttctgataattttacaacttcattattcatatcggccattttttgataatcagcaataatgtcatctaaaaatgcatctacttcttctcttctatagccacgagccatcgttttttcaaaatctttttcataaatatcttttgctgataatttcaatgaaacatctgacattttttccacctcattagaaactttgatcttcagaccactgtaagtcattgatgaatgctgttaattcatcgaacgtcacaatatcacaagtatagtttgttttatccataaaatcaactaacatctgcttgaagaacttaggactcgcctcttgttcctcatcataaatgagcaatgtttgatccgaatgttcaagcataaattgatctgcttgtttaaattgaaaaggaccttgatacgacgtatgaaaaatactatcaacataatctgcatgcttaattatgttggcatacttactttgattatgttcattccacttttctgtatgtccttggaacggtgtaattacagcaaactttaacgaatcatatgttcgttgtaattcaataacaacttctgcagtccataattctatacccatttgcccttgtattaacacccattctaatccttcatccaacagttgttcaattttatgttttataaattgttttaaataatgtacttcaggtgcgttatctttaaaaatgtttaattcgaatgatttgtaacctgttacataaactgttttaaccatcagtaccctcttttgttacgccatctaatatattttgtaaatcatattgaacacttttaagcttttctataaataactttcgacttgttcgcttaaaatgacattcgacagaaagttgttcaatgttagcaatcagtagctcaaatttccttgaattcatataaggtacttctataataaattcacgatgtaatttgatctcattgagtatgctatcaatatgttcagtatatggctttacagtttggtaaaaatcatgatcttgttgttgtgatttcacattttcaaaattttgttgcatgttgttaacttcataaattagtgattcgactacatcattcatgaggacgcctcctacattttttaatttatcacaatatactgtattcgtcatgttttaacactctatataatttgatttaactattttttcaaatgtgttatctgttaaatcaagtaaatctaaaaacttcctatataaatacaaaattttatcgtgtatgttgttatacgatgaaaatacttttaatctaataaaatcatttaaatcaaatacacctctgctgattaacaacacatacttgtacttgcctcaaaaataaaaattactaatcatgatttgacttttataacaaaattcaaaaatattgtaatgagtattcatttttataagcaaaacttttcaattaattaaaattgtgtgtaaaattccaacattaacggtaaatgtattataatattattgtgttaatgctgaaatcacgttaaaataagctttggtgtattgtgtctttcgcatttatactaatttaagtttggtgtttcactataatgttgtgtataataaacaacgtttactaccaaacttgtgtggtgaaatttatgaattatccaaatggtaaaccatatcgtaaaaatagtgctatagacggagggaaaaagaccgctgcctttagtaatattgagtatggtggacgtggtatgtcacttgaaaaagatatcgaacattcaaatacgttttatcttaaaagcgacattgcagttattcacaaaaagcctacgccagtacaaatagttaatgtcaactatcctaagcggagtaaagctgtgattaacgaagcttattttcgtacaccttcaacaactgattacaacggcgtttatcaaggttattatattgattttgaagcaaaggaaactaaaaacaagacgtcctttcctttaaataatattcatgaccatcaagtcgaacatatgaaaaatgcatatcaacaaaaaggtattgtgtttttaatgattcgttttaaaacgctagatgaagtttatcttttaccctattcaaaattcgaagtattttggaagagatataaagataatattaaaaagtctataacagttgatgaaatacgaaaaaatggttaccatattccttatcagtatcaaccaagattagactatctaaaagcagttgataagttgatattagatgaaagtgaggaccgcgtatgacggaaaacaaaggatcttctcagcctaagaaaaacggtaataatggtgggaaatccaactcaaaaaagaatagaaatgtgaagagaacgattattaagattattggcttcatgattattgcatttttcgttgttcttttactaggtatcttattgtttgcttattatgcttggaaagcacctgcttttaccgaagctaaattacaagatccgattcctgcaaagatatatgacaagaacggagaacttgttaaaacattagataatggccaaagacatgagcatgtaaatttaaaagacgtgccgaaatcaatgaaagacgcagtacttgcaactgaagacaatcgtttctacgaacatggcgcacttgattataaacgtttattcggtgcaattggtaagaacttgactggtggatttggttctgaaggtgcctcaacattaacacaacaagttgttaaagatgcatttttatcacaacataaatctattggacgtaaagctcaagaagcatacttatcatatcgtttagaacaagagtatagtaaagatgatatcttccaagtatatctaaacaaaatttactattctgatggcgtaacaggtattaaagctgctgctaagtattactttaataaagatttaaaagatttaaacttagcggaagaagcttatttagccggtttacctcaggttccaaacaactataatatttatgatcatccaaaagctgctgaagatcgtaaaaacactgttttatacttaatgcattatcataaacgcattacagataaacagtgggaagatgctaagaaaatcgatttaaaagcgaacttagtaaatcgtactcctgaagaacgtcaaaacattgatacaaatcaagattctgagtataattcatacgttaactttgtaaaatctgaattaatgaataataaagcattcaaagatgaaaatttaggtaatgtattacaaagtggtattaaaatttatacaaacatggataaagatgttcaaaaaacattacaaaatgatgttgataatggtagcttctacaagaataaagaccaacaagttggtgcaacaattcttgatagtaaaactggtggtttagttgctatatctggtggacgtgatttcaaagacgtcgttaacagaaaccaagcaacagatcctcaccctactggttcatctttaaaacctttcttagcgtatggacctgccattgaaaatatgaaatgggcaacaaaccatgcgattcaagatgaatcttcatatcaagttgatggttctacatttagaaactatgatacgaagagtcacggtactgtatctatttatgatgctttacgacaaagtttcaatatcccagctttaaaagcttggcaatcagttaagcaaaatgctggtaatgatgcacctaagaaattcgctgccaaacttggcttaaactacgaaggcgatattggtccatctgaagtacttggtggttctgcttcagaattctcaccaacacaattagcatcagcatttgctgcaatcgctaacggtggtacttataacaacgcgcattcaattcaaaaagtagttactcgtgatggtgaaacaatcgaatacgatcatactagccataaagcgatgagtgattacactgcatacatgttagctgagatgctaaaaggtacatttaaaccatatggttctgcatatggccatggtgtatctggagtaaatatgggtgctaagacaggtactggtacttacggtgctgaaacttattcacaatataatttacctgataatgcagcgaaagacgtgtggattaacggctttacacctcaatacactatgtcagtgtggatgggcttcagtaaagttaaacaatatggtgaaaactcatttgtgggacatagccaacaagaatatccacagttcttatatgaaaatgtgatgtcaaaaatttcatctagagatggcgaagactttaaacgtcctagctcagtaagtggtagtatcccatcaatcaatgtttctggtagtcaagataacaacactacaaatcgtagtacacacggtggtagtgacacatcagcaaacagcagtggtactgcacaatcaaataacaatactagatctcaacaatctagaaacagcggtggattaacaggtatattcaactaatccactcaacataaaatcctcagttataccatatttatggtgtagccgaggatttttttaggttcttcatcttttatggtgggaaggtaaaacttcctgctttttttataagtattcatacgctattgctatattagtagaaaccgtaaaatcagtcattcacatacattttgaaacatctaaatagtttttcatattcacatctttagctatgtaaaattattgaatttgaataagtggttgttcccatttttaaaattatgattatattttctcatagtcatcttagacgctgttttaaattgatatatttattaattccctgtgtacgttaatcagtgaaatatcaacatgtttgcaacatattttcacaatcatagatataagaaatccacctacgattcgaaatagatatcttaaagcatatctcaagatatccattatgatgtagatggacagtttttatattaagacgttgtaatgacacgacacctaacataattataaatatgtgtgcatgaattagttttatatattttcaacattaggaaatgatcaatcttgtctatacctgcttattctttaaccttgtttgataactagcattcattttaatcaattcagttttaaaggtcttcatttgtcgatagcccataaaatgatatttacgttcaatcatataatcatatctttctttaaaattcattggcacaacaggatattgatttaatttatcaaaatcaatattgccagttatgtcattaacctgcttaaaataatcaataattttactatggtattcatccaagtagggctttgcttcactagaacctaatgtcttatttttggcaaataaatcaatctcttgttctaaattatcaaatacctcttttgtaatatttgtcatgttatcacgcttctttcaaactagctttataacgtttttgtccttctctacaatcttctaatagtggacaaatatcgcatttaggttttcgggctaaacagtggtatcttccaaagaaaatgagttgatgatggctcctattccatctatctctaggtatgacagaacataaacggtcttctacctgtctcacattatctttccaacgattaatacctaagcgtttagaaacacgttctacatgcgtatcaacagctaatgaaggttcatcaaatgctacactcatgactacattagcagttttacgtcctacacctgctaaactttctaattccttatgtgtttgtggtatttctccattaaattgatcaatcaaagattgacaaagtttcttaatattcttagctttgttacgatacagaccgatagaacgaatatcattcataagttcttcatcactgactgccaaataatcttcaggcgttttgtattttttaaacagctcagttgttactctatttactagaacgtctgtacattgcgctgacaataatacagcaatagttaattcgaacggattatcatgttttaattcacattctgcatccggaaacatatttgctataacatcaatcatttctaatgcttttttcttacttaccatcaaggttctccccgtttaaccaatcaaatttaggtaccgttttaactgtgtgcgtcattttcggtttattgaatttttctcttatttttctagaatcgtcaattgttttgacattgtttttcttccaattaagtaaaatacgatctatatatttaaagctaagtttattcaaactattcgcctcgtctaatgccgcttgtataattgcagtatcgtgtttatcaacatcaatccattgatttaacgtttctatttcatatggagataacggccttgcaaatgtatcctctaaaactctaaataattgtttaaatttttctttactatttagctctttcgtttccatactttgttgcttcaatatatgacttaatttttcgaaaaaaggatctagattcatatattcggtaaatctaccttcttcatctttttgaacttgtaattctagcaattcacgttgtatcaaattttgaataaccattgtaatatcacgtggttgcatagttgagcccttctgaagcaattcaattgaaggctgtttatttgatgtttcggaagcataaatcaatttaagcaaaatgactaaatcttgctcatctaaacctaagtcactgtaatggtctaataattctcttcgtatcactacaggtcttgcttttaattgatatttatccatgttcgtgcccccttttaaatttaaccattacttaatagtataaatcattttctttaattttcgactaaaatgcttaatatatttaactagtagcaaacaaattttaaataacagtattttttaacactagattttaacaatgaactttatggataatcagatgaactatttattttccaaatatagttactaaacaaaagtttgttcatgattaatataagccgttatcaatcttcattttccaagaataaatcgcccagctattaatataggctggacgattctttttattatcataatatatattttaagtaacgaccctaaaacttatggatataaacggtttaataatcttgggaatggcgctgtttcacgaacgtgttcaacaccagaaatccatgctactgtacgctctaaacctaaaccaaatccacagtgtggcacactaccataacgacgtaagtctaagtagtaactatatgcttcttcgtctaatccatgttctttaacgcgttgttctaacaattctaagtcatccacacgttcagatccaccaataatttcaccgtatccttcaggtgcaattaagtctgcacataatacagtttcttcattttcaggatttggttgcatatagaaaggcttaattttagttggataattagtaataaacaccggtaaatcataatgattagcaatggctgtttcatgtggcgcaccaaaatcttcgccccattcaatatcatcaaagccttctgcttttaagaattcaattgcatcatcatatgaaattctagggaatggtgtcgcaactttttcaagttttgatgtatcacgctctaaaattttcaactctagtttacaattttctaaaactgattttacaacatgtgttacatattgttcttgaatttctaaactttcagcatgatttgtgaaagccatttctccttcaatcatccagaactcgatcaagtgtctacgtgtttttgatttttcagctctgaaagttggaccaaatgaaaatacttttccgtgtgccattgctgcagcttctaagtataactgaccactttgagataaaaacgcatcttgatcaaagtatttagtatggaataattcacttgtaccttctggcgcacttgctgtcaaaattggtggatcaacctttgtaaatccatctttgttgaaaaattcatacgttgcacgaataacttcatttctaattttcattacagcatgttgttttttagaacgtaaccataaatgacggtgatccattaagaattctgtaccatgatttttaggtgtaatcggatagtcatgcgcttctgaaataacttcaattgatttcacttgcatttcgtatcctaagtcagaacgattatcttctgtaattgtgcctgtaacgtatagagatgattcttgagtaatttctttcgcaagtttgaatacctcttcatcaacttctgatttaactactacgccttgcataaagcctgttccatcacgtaattgtaaaaaggcgattttaccacttgaacgtttatttgttaaccaagcaccaattgtaacgtcttggtttaaatgatctttcgcttgtttaatcgttgttttcataaccattctcctatttattttttcgttatacaatactcattcattttaacaaaatccgctttcaagttctagaactagactaaaagataacgtgtaaatggtaatgatttacgcacagatttgaacattaatttatattaagacaatacaatcatcagtttcagacaaaatatataataaagcctcaatattattagtatgaaggtcgttttttgtgctaacattcaagtttaattataaaactcaaattttgacgaccaaacaaaaattcttgtaacagaacatagcacatgtcatgtcacaagaattttactttgtatttcactttttctttttttgaatttgtcttaataattttccaaactgttgaatgtcgccttttttctgacgataattttcaagtgtttgttcaaaaaagtttttataattactgtttatgagtcgatcatcaaatgaaactattatgccgcgatcattttcatttctaattaatcttccaagtccttgtctaaaacgtgtaactgcatcaggtaatacatattccttgaaagttgaagtgaattcagaatccataagccaatattttgcattatgcttgttcataaacggtaacttcgctatcatcacacatttaataccatttgcttgaaaatcaaaaccttcaaaaaatgttgacgtaccaagcagtatggccttatcaaaattattaaactgttgtactattttataattttggttctgctgttgtgttaatacaacataatcttcaaattctggcaattcatttagcatatcttgtaccatatgcatcattttataactcgtaaataagactaaacattttgatgacgttatagtcgtatattcaataatatagcttacaatcgatgctacatactcatctatatttttatattgataagatgctacatcactcggtataaatacacttgtattttttgcactttgtaacgacgtgttaacttcaaatgtattaaagtgaacatctttgttgaataactgtttaaaagcttcaaacgaatgattaaattttaaagtaccagatataaaaatgagcgatttaaatttttccaatacttgtttcgttaatacatcttttacagcgtaatctttcacatataaacgtattgttgatttttgagataaatttttaatcgaaatgaaactagtatgtccagcttttaaactttgttcgatatttttaaatttatcttttaaatacaacaactgtttccgtaatgatttaactgttttatgactaatgccattgaatatttctagcgttttatttaacttatcgataatcgcatgtaaatccttcaaaatgtcttttgtttcaaaagtaaatacattatggaagcgatgaatatcatcatcataaacatcagaatcattgataatcgtaaatatcgttgagaacaattgctcatttaactcatgaatctcattcatactagccttcaagccaaaaatatcaattggtgcaatatctaatttttccaaaattcgctgcttttccagttgatcaattgcctttaacaatttttcattttcgtttttaccaatcaaaccaagctgatatttaatatcagcataactcaactcatttgtcacttgatttaaggcatagtctggtaagcgatgtgcttcatccactatacaatcatcaaacaattgatatattgaattttcaacatcagaatgaattaaatgtgcatgatttgtaataccaatttgaatgttctgtgcatttcgcttaataaaattataataatgaacatcgtgacgtgccggtacatatgtttcaattttctggtcaaaatacatcttttgaccaccttttaaatttaattcctgtatatctccggacggcgtctctgtaatccaaatcagcaattgcattttcaagatattcacttcgtaattacttgtgtcatcttttaaaatttgactaataagccccaatgaaatgtaatcacttttacttttaatcaatagtgcattaattttaaaattcaacgcttcattcattgctggaatatctttttctaacaattgactttgcagtaatttagtattggtagaaatcatgacatgcttcccagtttcaatattatacatcaaggccgcaagtaaatatgctaatgatttaccactgcctagtgatgcttcaatcattgctttttcactatgcatgagctgatctaatatagtttccgctaaatataattgttgcggtcgatatgttaagccaagttgatctacagctttgctatataaagacttcaagctgccattataatttgttgtcggctttttaaaatcaacttgcttacgatagataatctgttcgaacttttcgtacgatttatccaatggctttgcatcatattgcctaaccatctcaaagaaaatatcatacaaatcgtatttcaactgtttacttaaataatataattgcttcaaagtatctaacggtaacttttcaaatttttcaaaagctaatatcatcaatttagcagtagtagcggcatcttcgtcagctcgatgggcatttgctaaggtaataccatgtgcctctgctaattcacttaattgatagcttttatctgtaggaaaagctattttaaagatttctagtgtatctataacttttttgggacgatattgaatattacaatctttaaatgcctttttaataaaattcaaatcaaaatctacattatgagctacaaaaatgcaatcttttatcttatcgtagatttcttgtgcaacttgattaaaatatggcgcttgttgtagcatattttcttcaatggatgttaacgcttgaatgaacggcggaatctctaaatttgttctaatcatagaatgatatgtatcaataatttggttattgcgcacaaacgttataccaatttgaatgatatcgtcaaaatctaattggttgcctgttgtttccaaatccacaacggcataggttgccatacccatagctatctctccttgctttagtgttaaaaatctatatctgcactaattaaacggtgtgattcacccgcttcatctctaacaattagatagccatcgtaatctaaatcaattgcttgtcctttaaactgtttatcattttctgtaaatagcaacgttctattccaaatattagaagctgcagtatattcttcacgaatttcagaaaaaggtaacgttaaaaattgattatatcttttttcaatttcttgaagtaatatctctaaaaattgatatctatctaatttatttttatcatgtaattgtatacttgttgctctatgtctaatactttcatcaaagttttctagttgttgcgtcaaattaatacctataccacatattattgcttctataccatcattattagcaaccatttcagttaagaaaccacacactttaccattatcaatatatatatcattcggccatttcactttgacttcatcttgactaaaatgttgaatcgcatctcttatccctaatgcaataaataaattaaatttagatatcattgagaatgcaacgttaggtcttaacacgacagacatccaaagtccttgcccttttgaagaactccaatgtctattaaatcgcccacgacctttcgtttgttcatcactcaagataaaaaatgaagattgatttccaacaagtgactttttcgcagcaagttgtgtagaatctattgaatcgtatacttcactaaaatcaaacaaagcagaactttttgtatattggtctattataccttgataccaaatatctgggagctgttgtaataaatgccctttatgatttactgaatctattttacatccctctaactttaattggtcaatcactttttttactgcagtgcgtgaaatattaagtgattccgcaatgctttgtccagatatataattcggtttatttttatagagtaattgaagtacatcttgactatattttgacatgattatccacccatttcaaaatttcagtttcttcgttgcttactttacctgttacaatcgctatctcaatttgtcttagcacatcttttaaccacggaccacttttggcatttaaatgtgccataagtacaccgccattaaccatcatgtcttttctattatgcataggtaaacgatgtaatgtttcatcaatcgtttgaaggttaacgattaatggttcatgtccttgaatatcatttgcctttaacacgtctgctgcaaccattacatttttaatgagatgcgtatcataatcataaacaaacatttttaattgttcttttgtaataatacttggtaatgcattcataatttgaatatattgattgatatcttttacttgtcggttacttagctttaaaggcttcaatgagtaattaatatcaaatttaactgatactatagcaatcaacaattctaaatcaattgcttcagttacattaatttgattcatatcaagatgttcgaaatacggcatataattaaatgctttcagcgattttaaatgattaaaactcttttcaacattaatacctcgcattaatttagttagttcaatcactatacgctcaattgataaaaatttaatatctgccatttgtatacgcatcgcttcgaatgtttccgttgcaatatcaaatgataattgtgactggaaccttaaacatcgaatcatacgtaaagcatcttcttggaatcgttcctcagctatacctacagttcttattattcgattattaatatcttgttgaccatcaaaataatcatacaatttgtatgctgtatccattgctatcgcattcatcgtgaaatctcgtcgttgcaaatcttcgtataaatcacgaacaaatgtaacaccacttggtctacggtgatcgacataatcttcttcagcccggaatgttgtcacttcataattttcatcattaaaaactacatttatcgtgccatgttctttacctacaggtatcgtatgactaaagatagattctatttcatccggcgttgcacttgttgtgatatctatatcatgaatatttcttcccatgacataatctcttacagagccacctacataatatgcttcaaaaccattgtcttgaatttgttctaatataggccttgcctgttcaaataatgatttatccatattattactcgcctttacttttgttatgctcatttagcattttttgataataatactcatattgatctgtaataagttctgatccaaaacgttcagcaatatctgctagcatgtttttctgaagtttgttgtataacaccttatcttcaagtaatcggatagcatagtcactcgctgaatcacaatcacccacatctacgacaaatccagtttcaccatgtttaataacctctttaattccaccggcatttgaaccaattggaacgacgcctgttttcatagcctcaagtaaagttagtccaaagctttctttttcacttaataataatactaagtcagataattggtaaaattcacttacgcaatcttgtttccctaaaaataaaacatcctcttctacgtttaactctttcgtcaattgacgcattggcactaattcaggaccatctccaagtaaaattaatttactaggtatcttttcacgtacttttgcaaatgtttctataatagtatctatgcgttttacttgtctaaaattcgatacatgtattaacactttttcatctggtgctataccaaattgtgattttaatgctgtgttatgtttagttggaaactcattttcacgtacaaaattataaatcggtataatttctttgttagtttcaataatttcatgtgtttcttgtgctaaagatttactcacacttgtcacaatatcacttttttcaatgccaaatttaattgcaccttggagtgaatgatcatagcccaaaacagtaatatcagtaccgtgtagcgttgtcataatttttatatctttacctgacatctcacgagctaaaatcccacaaattgcatgaggtacagcatagtgcatatgcaacaaatcaagatcatattctttaataacttcagcgattttagtacttaacgtaatatcatacggtggatactgaaatactgcatattgattcacttcaacttgatgaaaaatcatattcggtaatggttttcttattctaaacgggatatttgaagtgataaaatgtacttcgtgacctcgctctgctaatttaattcctaattctgtggcaataattccagaaccacccatggacgggtaacatgttatacctatcttcattcgcttgcccatcctttctttctatttctctctattattctcgatgcgtagataattgtttaaatttaagtttatagtaatgttgagtttataatttcatatatctaaaaacaggtgttgtatatataatcattcatctagttatacttactttaaaaataatataatttcatgcgatgcaattcattgatggatgtttttaatcttaatcaaatccaaataaagcatatatttttaaattcactttctttcgaatcgatttttatctcttgtattaaacttttccattgtttcattaaagctctctgtcatatctattcccattgaattcgctaaacataacaacacaaataaattatcacctaattctgctttaatcgtatttgcttcctctgaatctttcttctttttttcaccataggtatgatttatttcacgtgcaagttcgcccacttcttcagtcaatctagctaagttagctaatggtgaaaaatatcctgttttaaattgtccaatatattcatcaacttcacgttgcatttctaccattgatttcatttctacgttctccttatattgcatttctaatatagtatatatcaatttgaagtctcatgcatgtttagtgcaatctactgactctagctaaactagatgacaagttgtttattttagaagtttaataattcagtttatataaatgtaatgcattcctaactaaattaaatcaattgaaattgggattataactttatgatacgtaccactacaataaaataatatagtgaataatctaccattagaaaaataagcacaaaaaaactagcaaccacacaaaaatgtgattagctagttaataagtgtctaatttaagttaattgttaatctataagattaatcacttgaacgcgcaatcaaaataatacgtacaagctctgctacagcgactgcagttgctgcaacataagtcattgctgctgcagataatactttacgcgcatgcttgtattctttttcatttacaatgttcaatgccgtaatttgtttcatcgctcttgaactcgcatcaaactcaactggtaacgtaacaattgagaataataccgctaatgacattaaaccagcaccaatccataaagcagttgaaccaaatgcactacctatcgctgttaagataatacctaacatgatgatcatataacttaatgaactccctaggtttgcaacaggtactaatgctgctctgaatcttaagaaccaatatccttggtgatcttgaatggcatgaccaacttcgtgggctgcaattgcagttccagcaactgatggtctgtcatagtttgcaggagatagtgaaacaactttctttttaggatcgtaatgatctgttaagaatccttcacctttaacaacttcgacatcataaataccgtttgcatgtaaaatttctaatgcaacttcacgacccgttttaccactagttgatctaacttgtgaatatttctcatagttagatttaactttgtgttgtgcccataaaggaagcaccattaatattacgaaataaattatcatagtaaaaattgaagacaataaactcactctcctttataaatattttactgtcatttgccgtttttatcaaatcatttacactttaataatttgtttaattcaatataaagcaaaagtccaaaaacacttagacaacatgataatacaccaatttgccacacatgtgtagttataaaatcataatatggaaattgaaggtgaaaatagtcaatataatcattcaaaaacacccaaatcatcgctacactgattccaatcatagaacgtttaaactaggatagaagtaaattgcctgaacagccattatactgtgggaaaacattaataccaaaccatttactgtaatatcaccttgttcaataataaataatatattcattataactgcccaaatcccatatttgaataatgttacaaatgccagtgcatcgataatactattttgtttttgaattaatatcaatgagatagaaataactaagtataatattgcagttgggctatctggaacaaaaatcttaaaatgccagggcgtatgacttaattgttcaccataccatatataaccataaatcatccctaatatattacaaatgagtagcatcattaaccaagaacgttgataaagtgtatattgccaaaatgctttaattgtcatctgctaagtcctcaaattgattatgtttatttactagcttgagtgtatttaaaatttgcgttagttgataaaaacgttgcttttcattcatctgtaaacttaaatcaatattgtgtaacaagtaatctattaataacgcatgtttatgccgatctatagccatactatttaagtcatgaagataagtttgataactgggcgattccgttagttgagcaactattaaatcatctagcctttgctcacgctttgacacgtttgcgaagtgaatttgaatatcaaaagcacagttatgattagcgatataatcaaatatttcatttgtattcattaactttatattacgcttagtaaattgaattgcagaagcgtgacttcccacttctgcaatttctaatgtttcatgatgattaatttttgtatctacaaaatgaatgtttgccaatttcgcctcattcacttttatatagttaagcacccaaactgcaatacgcgacttaaatcgatattgaaaaagtaaatattcaataaaactttctttaatttgattgaatgtctctgacatcaaataccccattttaagattgcaatcttgataattcgtcatgccaattttcgttacttggctctagttccaacaattgatttaaaatagtaattgcttgttccttttgaccaatttcaattaaatagaaataataatcactcataaaatcaatatttgttttcatcgttggatatgctaattcaaagaaatgttgagcttctttatctcgctcttcttgaccataggcgaacgctaaatgccacatgaatgtaggatccaaatcttcttcatctacatatgttaataattcaatgattgcttcataatcttcttcattacgatataaatcgcttaaaatcaataaaggttcttggtaagcattatcaacctctaatgcttgttttaacaataatacaccttcattagcatcgccgtgttctatttccaaacatccagttgtatacattaactctttataaaattgacttagtcgtaatccttctttacccgtttcaatggcatctggataattttttttattttcatataatgattgtaaatacaagtagccttgaatataatcaggatctttagaaagtaatgtagtcattattttaattgcttcttgagtgatgtcatttttatcgtaagaaatggcttttttgagataatcttctgaagtcatttcatcttcattaatttcatcgtataagcgaatcgcatcactatagttaccactttgtaaactacaatctgccatacgagagaataagtttacaccattaacttgatattcaccagtttctaaaacggtttcgtattcagaggtagcacgtaaatattgaccatcataatataacatttcagccaatgcaaaatggattattggatcatttggctctagttcaagtgcttcttgtaatttatcaatagcaacttccatcatattaatttgttgatataaatctgcttctaacatcaacttttcaggtgatggttcaacataacttaaatattctaacgcttcgtcagtttgattttcagacattaaaccttcaataaaataaatcagcaattcactttcgtctggatatttgtgatataacacgcggaatacttccaaaccttgtggcattaatccaaaattgtaaagtgtctctcctagaataaataatgcgtcatcgttgtcagtagttattgcttcattaacacgagagtctaaattttctagtttttgtagattgatatcgtctattaatttatagatatcttccattttatattatccctcattttctaaaagctttagttttggtaaaaatcctggaaatgatacatttacagcatcaaattgtttgattttgacaggctcgcttgaaagtagagaagcaactgcaagcatcattcctattcgatgatcagttaaactatcaactgttgcatttgttttaaattctgacggatgaataatcaatccatcattagttggttgtaattcaaaccctaacaagtttaacatatcagccgttgtatcaattctatttgtttcttttacttttaattcctcggcatctttaattgtactcgtgccaactgcttgtgtacaaagtaatgctattacaggcagttcatcaattgcttttggaactaattctccttcgattgttattggttgaagcattggtgtgtattgaatacgaatagaagcagtaggttcagcaccagttgtttgattgaaaagttggatattaccgcccattttttcaacaatatcaataatacctgaacgtgttggattgattccaacattatgaattgttacatcacttcctggtgtgataagtgctgcaacaataaagaacgctgcagatgaaatatcgccaggaacatgaaaatctgcaggtttaatgtatcgaattgcttcaggggttgtattaattgataacccttctgcttcaattggaatattaaaatgtttgaacatcgtctcagtatgatttcgacttacatctaattctttaatgatggtcggttccttagaaaacaaacttgcaaataaaatggcactttttacttgtgcacttgcaacttccatttgataatttataccttttatgacagatggcttaataattaatggtgtataattatcttcaataccttcaatattcgcatccataagtttcaatggtctcaagacacgatccattggccttttaccaattgaaacatcgccagacaaaacactttcaatacctaaaccacttaacaaacctgccaataatcgtgttgtcgtaccagaattacctgtatacaatacttgatgtggcgtgttaaaagattgatatcctggggaagtcacaactaatttttcatcatcttctttgatttctacacctaacagtcggaaaatgtccatcgtacgacgacaatcttcgccaagtagtggcttatatatagtagatacaccttcagctagcgacgccaacatgattgcacggtgtgtcattgacttatcgcccggcacttctatttcgccctttaacggacctgaaatatcaatgatttgttcatttaccatttcattcacctacttaaaatatgtttttaattgttcacatgcatgttgtaatgttagttgatcaacatgttgtacaacgatatctccaaattgtctaatcaagaccatttgtacaccttgcttatcattctttttatcacttagcatatattggtataacgtttcaaaatccaagtcagttatcatgtctaaaggatagccgagttgtattaaatattgaatataatgattaatatcatgcttagaatcaaacaaagcattcgcaactataaattgatagataatgccaaccatcactgcatgaccatgaggtattttatgatagtattcaacagcatgaccaaatgtatgacctaaatttaaaaatttacgtacaccttgttctttttcatctgcaataacaatatccagcttcgtttcaatacctttagcaatatatttatccataccatttaatgactgtaatatctctctatctttaaagtgctgttcgatatcttgcgtcgctgattcaccattcaataacgcatgcttataaacttctgcatagccacttaatatttgctcaaatggtaacgtctttaaaaagtctaaatcataaatcacagcagttggacgataaaatgcaccgataaggtttttaccttgctttgagttaatacccactttaccgccaacactagaatcatgcgctagtatagtcgttggcacttgtataaagtgaacgcctcgtaaaagtgtcgccgcaataaacccagcaaaatcaccagttgcaccaccaccaacagcaataattgctgtattacgagttacatgatgggataaaatatactctaatgtttcttgatattgctcaaatgttttcgtcttttcaccagctggaataataactttatgtacattttcatatgataaaatatcatcaaatttatcagcaaaatattgatttacatgctcgtcaattaatataaaactttgatcaaactgatcaatatacgtgctaatatggtcaattgcaccgtgttcaacatatattggataattatttgaagggtatgttgtttgtaatttcatgattacacctcaattgttcttgttgttaaaactcaatatttaattgtctgcgctcaataatttgttgtttaagttgctcaatatgatttgattggaattcttccaataatgcttttgctatttcaaatgctacgacatgttcgcagacgatacttgctgcaggaacagcacaactatcagaacgttcaattgttgctttaaagtcttctttagtattaatgtctactgaatttaatggtttatataacgttggaattggtttcattacaccattaacgataattggcattccatttgacataccgccttctaaaccacctaagtgattagatccacgataataaccaatttcactattatatagaatttcatcttgaatctcactacctggcttttcagctgctttaaatccttcaccaaagcttacacctttaaaagcatttatgctgacaacaccttgtgcaatcttaccatctaacttacgatcataatgcacataactacctacaccaacaggcatattttcaactacaacttgaacgacaccgccaattgaatctccttcatttttagcttcgtcaattttatctcgcattgcttgtgcgatactgtcatcaattacacgaacatcattacgatcaagatttgctttaaatgtttctgaatcataaaaatctttatctttaattccacctatttcaacaacacgactgtatatatcgatatctaactgttgtaataacactttacataaggcaccgactgcaactcgagctgctgtttctctagcagatgatcgctctagcacatttcgtaaatcacgatgattatatttcatacctccaaccaaatctgcatgaccaggtcttggttttgtaatagtacgtttcatattttcacgttcttcttcacttattggagctgctcccataatttttctccaatgcgtaaagtcatcattggttacaaccatagtaattggactacctaatgtataaccatttctaacgcctgatactatttctactgtatctttctcaatttgcatacgacgtccacgtccgtaaccgccttgacgcttaaacatttctttattaatatcctcaaccttaatttctatatttgcaggtacaccttcaacaataactgttaattgaggtccatgtgattctcctgatgttaggtatctcatacacactcgctcctttcatacttccacgataacattataatatgttgttaatcttatcatattcattgtgcattcataaatgtttgttttcaagctcaattaagaaaatggatgacatctcattttaaatgtcagaattatcttaatattaaacgaactaaaattaattataatatattcgtctgtagaaaagtatcatgaatttctaaacagttgcatcatataatcattaattaaaaatgattagccgttttaatataatcgtatcgcaactttagcaaataatatactgactacatttcttaatacaaaagaacgaactgttaattattaataaagttaatcagtccgtttaaaaaaattatgatattaaaatatacatatgttaagcgcttttgttatactttgacttcaaaaatataatcaattcttttactaatacataaaaaatataaatgagagtcagtataaaaataatttttgttataggattaagtggtttatctaaaaatatagcaccatatagtaattccattaattttaagaacattaaaatccccaaaataatcgaaataatattcttcattttaacaaccccttctctctgtttagtttcatttgataaagaatattcctctctttttaatacgtgttaccaaaaaactataaaatttttcaagtaatttactacaacataaaaaacgggccttgttatgtataatcataatgactaaccacataacaaaaccctttctacctttataaataaatcgtaaaggtttacagtttatattttattcatataaccatgcatcacgtggtgaagcatagctagtaatttcattttcattaaaccatagattaatttcacgttcagcagactctaatgaatctgaaccgtgaatgatatttctaccaacagttaaacctaaatcacctctaattgatcctggtgaagcttctgaaggattggtgctgccaataatatgtctagatacattaactgcatcttcaccttcaactaccattgcgaacactggtgctgatgtaataaatgaaattaaatcattataaaatggtttaccttggtgttcaccataatgtgtttcagcaagttccattggtacttgcattaatttaccaccgacaagttttagtccttttctttcaattcttgaaattacttcaccaattagatttctttgtactgcatctggtttaatcattaaaaatgtacgttccactttatgtatccccctgtgtttaataggtttatgtatattactattatatattaacaggttggtaaagcgctttcaatacttttcataaatactacgtgtttcttgaacccatttttttcgtcaaacttaaaagtagtgatttcggatgtccatctggtaactcagaaatcaaattcaaagctttacttaaatacttcgaacttactgccttagcctcatcgatgctgtcagattttctaatgatttggatacattcttcaaattctttgcgttcactatcacgacgtaactgttcgattttcaatttgaagtctggatttttacgcatttctaataaaatcggtaacgtaatatgaccattaagcaaatcacttccgaccggcttacctaatttcttttcggtacttgtgaagtctaatacatcatcaatgatttggaagctcatacctatataatgaccaatcattttcaattttcgtacagtctctttatcagattgagaagtaattgcaccaacttcagttgatatttgaattaacagtgctgttttgcgattgatacgtcgtaaataattaataattgtctgttgactgttaaattggtcttgaaattggaaaagttcccctctacaaacatcaacgatagattcagatatcaattgatgtacacgattatctttaacggccattaagtgttcaagtcctaatgccaataaaaaattcccagttaaaatagcagttgtctgatcccatttctttgatatggttaacttgcctcgacgcttgtcgcttttatcaataacgtcatcatgaacaagtgttgccatatgaattaactctaatgcgactgcaacttgatacgtttgttcagacgtttgttcatctttgccaaattggctactcagaataacaaatgctgggcgtactcttttaccaccagaagacaataagtgtaatgatgcctgttctaatacagaatctttactttttattgccttttcaagtcgttgttccactttcttaatttcattgttcatgtttaactttgccacgttaatcacctttggtattatctttttctttatagccaaggtgcattgcagcaacgccccctgtaaaactacgtactcttacatttatgaaacctgcttcttcaaacatgcgcttcaactcttcttttccaggaaaattaaacgtagattgctgtaaccattcatattcttcttttgattttgcaaataattttccaaaaataggcataacaaatttaaagtatagtgcatacatttgtttaaagactggcaaagttggttggctcgtttcaagacataccaccataccacctggtttaagtactctattcatttcttttaacgcgactaaatagtctggcacatttcttaatccaaacccaattgttacataatcaaaagaattgtcttcaaacggcaattccattgcatcaccatgaacaagtttaacattttccattgaagcagttttttcttttcctacttctaacatattctcactaaagtcaataccagtaacttcacctgttggtcctacagctttgcttaatgcgattgtccaatcaccagtaccacaacaaacatctaatgctttcgtcccttttctaacacccatgtctttcatgacgcgttttctccatactttatgctgctcaaaactaataatattatttaatctatcatatttttttgaaatattttgaaaaacgcgatgtacttgctctttatttgctttattgtcagccatgcttaattacctctactttttaaataacttttttggatatcgtgtaagtaatgctttacttcactttgattatatttcttgaagtatgatggatagtaatcagacatatcttcaaataaataattatatatttccgactcatcaatattgataccgaaatgagataacgtaatatatgggaaaagtgtttcaatttttactattgcttgagaaatttcataatcatttaaagcttgatgatgtaatgaagatttcaattcattaatttcaacaattgctttactaatttcattttgaaatgataaatcattgatttctgctagtagcgtataaaaatgtgcactaattaaatctccaatcaaaatggaatgtttagacaaatgattatatgtaatgtcatcaaggtgtctcattgatgtgtcaattgtgaggcatgccactttggcaacatctggaatatcatataaatcaagtaacttacctaaccgatgattaatattaatggattcatattctgatacgccctttaatctttcttctatttgtctttccaatttgctaacagttgtttccatgtctacacctcacgatattatcactattcatattaacattatatgtaagaaattaaaatcttttgaagcattaagattacttatcatttttaaatttcaatttaaactaacagtaatttatgtagcttttgtaattctcataataacctttacttcatttacattattcatctttttaaataacgtaaaatactatagtagacatggttaccttttaagtaaattcaacgctaacaattaatctcaatattcatatgtatattttgtagttgctatttttatcaaaactattatgtcatgtaatattttgaacgcttaaacaatgaatgttccaaagattaaaaacttagaagaacattacaatttatgtacaggttgtaagtattaaaagcaaaataaaaagcccttattcagggctttttaagtaaaattattttacagcatcttttaatgctttaccagctttgaatgctggaactttacttgctgggatatcaatttctttaccagtttgagggttacgacctttacgtgcagcacgttcacgtacctcaaagttaccgaaaccaattaattgtactttttcacctttagcaagtgagttttggattgattcgaatacagcatctactgctgaaccagcttcttttttagttaaatcagcttgctctgcaactgcattgattaaatctgttttgttcattagacattcacctcctgaggtttgataatgatatgtttatatcattatggtaaaactttaacacaagcattacataaatcgcaatcatttatgtggcaaaaacgttgaatttaagccatttctattcattttacgtaattattagccgtatatgtgtaataatacacattttattcagattttttatcgcgctccattaaatcttttacgcattcttttactgagatattttcaaataatactctatataatgcatttgtaattggcatatccacatttttttctttagctaaatgataaactgatttagttgtataaataccttcaacaaccatattcatttcagataatgcttgatccattgattcaccttgtccaagtttatatcctaatgtgaaattccgagaatgtgttgatgtgcaagtaacgattaagtcaccgataccacctaaacctagaaatgtcataggatcggcacctaacttttcacctaatctactaatttccgctaagccacgagtcattaatgcagcttttgcattatcaccgtagccaattccagctacgataccacttgctactgcgatgatatttttcaatgcaccaccaagttcaacaccaatcaagtcatcattcgtgtacacacgcaaataatcattcataaataaatcttgcgttaatttacttacacttttatcttttgatgaagcagcaactgtagttggttgcttgactacaacttcttccgcatgacttggccctgacaacacgccaatacctgcattatattcaggtgaaatagaatcttcaatcatttctgacacacgtttaaacgtcccattttcaatacctttagcaacatgtataaaagtctttttagaggtcagcttatcattaatttgagaagcaacttctcgcattgctttagtaggtaaagccattaagtaaatatctgcaaattgaattgctttggtcatatctgaagtagcgatgatgttaacatctaatttcgcgtattttaaatactttttatttgtatgacatgtatttaattcatcaacagcatcttgatttttaccccacatcaaaacatcatgtccattttctgcaagaacattggcaagggctgtcccaaaacttcccataccaaaaacggtaattttagtcattgttatcccccaatcgttaatttctctttcgagctataatatgaattggtgtaccttcaaaaccaaaagcggcacggatttgattctctaaatagcgtttataagaaaaatgcattaattctacatcattaacaaatacaacaaatgtcggtggttctatagcaacttgtgttgcataaaagacattcaaacgtctacctttgtctgttggtgtagggttcatggaaattgcatcagtaacaacttcatttaaagttgaactttgaacacgttttttatggttttcacttgcttcattgatgtaagggaataatgtacgtaatcttgtgcgttctttagcagacacaaaagcaatttgtgcataatctaaaaattggaattctttacgtacttcatcttcaaatttcttcatcgttttactatctttttccacagtatcccatttatttacgacaatcacgactgctttaccttgttcatgtgcatatcctgcaacacgtttatcttgttcaatgatgccttgttctgcatctatgaccactaaaacaacatttgaacgttcaatcgcttttaaagctcttaatactgaatatttctcagttgattcatatacttttccttttttacgcataccagcagtatcgattaaaacataatcttgtccatcataactatactctgtatcaatagcgtctctcgttgtccctgcaacattagaaacgataacgcgatcttcacctaaaatagcatttactaaacttgatttacctacgtttggtcgtccaataatggatagtcgaattgtatcttcatcataaggatcttcttcctcttcaccaaaatgagaaacaactgcatctaacaagtcaccaagacctaaaccatgtgaccctgatatcggatacggttcaccaaatcctaatgaatagaaatcatacacgtctgtacgcatttccatattatctactttgttaaccgctaatacgaccggttttttagatttgtataaaatttgagcgaccatttcatcgctttgtgtcaatccttcacgcacgttaaccataaaaataataacatccgcttcatctatggcgatttctgcctgcgctctaatttgtgtttggaatggtgcatcaccaatttcaataccacctgtatcaataatattgaaatcatgtgttaaccattcacctgaagaataaatacgatctcgtgttacacctggcgtgtcttccacaatcgaaacacgttctccaactattctattaaaaattgtagatttacctacattaggcctacctacaatagctactataggtttagtcataagctaacttcctctctttcttatatctttttaataatatcacatgagactgtgtattcaaaatgagtttattactgtaatgataaaaatcagcacttaaaactttatctttttaaacacttagttaaatttgtccacgttatcattccgagtatattttgttacataaaaatactccacatgcaatcataaacatgtggagttgactattaaatattaaattatagtttaagatttttaagtttatcaccaatcatatcgccaattgttggattatcttcttcttcgttttctaagtacgccttagtcgtagaaggatcactttcaacaacatcttcgtttggtaatgttgctttaatagatagtgatactctttcattctcttcatcaatacctaatattttaacatttacttgttgaccaggttctaacacttcacctggcgtaccaatgtgtttgtgtgcaatttcagaaatatgtacaagtccttgtacacctggtgcaatttcaacaaatgcaccaaagtttgccaatcttactacgacaccttcaatgacatcattttcgtggaattgacctttaatattttcgaaaggtgttggtaacgtatctttgattgataatgaaatacgttctgtatctctatcaatagatttaattttaactttaacatcttgaccaattgaaactacttcttctggtgtttgaacatgttcgtgagaaagttcagatacatgcactaaaccatcaacaccgccaatgtctataaatgcaccaaattgagttaaacgcgctactttaccatcaataacatcgccttcatttaaagattgtaataattgatcttttttagcatcgttttcttcttgttcaactgctttacggcttaaaatgactctattattttcaggatccaattcttcaactttaatacgaattgtttgtccatcaaacacagagaaatcctcaatgaagtctgttgaaattagtgaagccggaacaaaacctctttgtcctacatcaacaaccaaaccacctttaactacttctgttactttcgcttcgatgatttcattattatctaatttttcttgtaaataactataagacttctcagtttcaagttgtcttctagataagatgtaagctccagtttcattttcttcatcaaactcaactttagtgacatatgcttcaacttcgtcgccctcttttacaacttcacttgggctatcaatatgatgcgtagatagttgactaataggaataatcccattaaatttaccaccgttgatatgaacaacaacttgcttgtcttcaacttgttgtacctcgccagtgactttgtcaccttctttaatatcgttaatcattgattcattgaattcttcagtcatcttgtttgcctccttatacactacatatttataacatcttataaactgacagaattgtcaagaaattctacctcgattacattttgcgaaatagtcatatacataaatatgtcactttatcatattcaagtcgtcatatcgataaatatttattacaaccatttttgtatcaaagtaatacagtttgctatgtttatacatattttttgtataaaaattagcatagcttactattttgttttataagtctgtcatttcattgttctctacaagatatattatagtaaaattttatacttttataaaacaaaaagccacgcaaataagcaacttttacatttgaatagtaagaagaccgtatatagtgcatctttctcgaattattacataggacattttttgtgactaaatcagcttcttttgcaatatttagatttgtaacactcattttcttaccatttgtaaaatgctttatgaatgtaatgaattatttttggaattctaataattcacctttattatttctttttactttttgaaaaacttacacaattcactgacgcattaacttttaccaaaaataaaaaggcaactttcattcatcattgaataaaaatcaccttttaatttgagtaaatcattatcagcacattcattttgtatatgcgttaagcgttgcacattacaaatagatagttatgacttattagattatttaatttgactcaccatcgctaaaatttcgtcagtaacttcttcaatcgacttgcctgtcgtatctaatgtcactgcatcatctgcttttcttaatggtgatatttcacggttcatgtcatattgatcacgagcttcaatatcacgttttaaatcttcaaaatttgattcgatacctcttaattgattatctttatatcttctttctgctcgctcttcaactgatgcaatcatatatacttttaaatctgcatctggtagcactacagttccgatatcgcgaccatccattacgatacctttttctgcatctaactctttttgttttttaacggcgaatgaacgtactggctctttagatgcaacgtatgaaacatgttgcgtcacatcattatttcttaaaaagtctgttacatcttcgttatctaaaatgacacattgacctttatctgctttataagttaaatctaatgttgtttggtcaactagttttgcaaagtcctcagttttgtttaattttaaatatttgtatgttaatgcacgatacattgctcctgtatcgacataaatcattgatagttcgctggctacacgtttcgcaattgtactttttccggcagcagctggaccatctaatgcaatattaatggctttcatgcgtcatttcccttccttgtcgttttatgaataatattttatcataattaggtaaattaaatataggaggaaatatatgaaacatctacttgttattcatactggtggcaccattagtatgtcacaagaccaatctaataaagtagtaacaaatgatatcaaccctatttcaatgcatcaagatgtcataaatcaatatgcacaaatagatgaattaaatccttttaatgtaccatcacctcatatgacaatccaacatgttaaacaattaaaggatattattttagaagcagtaacaaataaatattatgatggtttcgttatcacgcatggtaccgatacgttagaagaaactgcctttttacttgatttaatattaggtatcgagcaacctgttgttattactggcgcaatgcgctcgtctaatgaaattggttctgacggtttatataattatatttccgctattcgcgttgcctctgatgaaaaggcccgtcataaaggcgtgatggttgtatttaatgatgaaattcatacggcgcgtaatgttaccaaaacacatacgtctaatacaaacacatttcaaagtccaaatcatggtccgctaggtgtattgacaaaggatcgtgtgcaattccatcatatgccatatcgccaacaagcattggaaaatgtcaatgacaaactaaatgtaccattagtaaaagcatatatgggtatgccaggtgacatttttagtttttatagtcgagaaggtatcgatggtatggttattgaaacgttaggacaaggcaacatacctccaagcgcattagaaggcattcaacaattagtatctttaaatatacctattgtgctagtttcacgttcctttaatggtattgtgagtccaacttacgcatacgatggtggtggttaccaactcgcacaacaaggttttattttttctaacggcttgaatggtccaaaagcaagattaaaattattagtcgcgttaagcaacaatttagataaagctgaaatcaaatcatattttgaattataatgaatacgtaacataaaaaggtctatgtacaatcattagtcatcaacctcatttgacatatcatgaatgtcagtcgttgtaaaactaagttatttagtacatagacctttatttttatgattctaagggcgtttgtttcttagctagcatgctttgagcaataatgcccccgtggaatttaccattttcaataaaaatggtattcgcatcgttccctgcagcaattacacctgcaatatagcaattttcgatatttgtttcgtatgtttctttattatacataggcgctgttccaaattcatttgtattaatttgaatgcctacagattttaaaaattcataatcgggatgataaccaatcatcgcaaatacataatcattgtgtatcgttttactttcaccatttacttcataagtcacagtatcttcagttatttgggtaacattagcattaaattccatgtcaattttttcatgatttactaatgctgtgaaatttggaagtatccacggtttaattgaaggcgaataatctccaccacgatatagaaccgtcacgttagcaccagctttttccaactccaaagcagcatcgatagccgaattcttaccaccgataattacaacatcttgatcaaaatacggatgtgcctctttaaaataatggaacactttaggtaaatccgcaccttcaacttctaatgtattatgctgaccataatagcctgtcgcgattgttaaaaatcgacattcataaacatctttcgtcgtagtaatagtaaatttattattcatttttttaacagttaatacttcttcaaatgcatttacttttaattgatgatgttttacaacttctcggtaataaactagcgcttgattacgtcttggtttactttcttcaacgataaacggtacgtccccaatacttaatttatcacttgatgagaaaaatgtttggtgagtaggataattgtagattgattcaacgacattacccttttcaataattaaggtatcaataccttttcttttttgttcaatagccgcacttaatccgcatggccctccaccaattatgatactttcaactttttgcattgtttcggcctcctttaatcccaaactattataacagttcagtgattgatgcgctaagtctgtgcttgaagatttatgatatatttttgacaatttgtttaatgtgcatagagaattgttagctacggagttgaataacactacaatttaatatgttgatttattttttattcttcctcgttaaatttgttgattgtggtgttttatctttttgatgactatttaaaaagttaaattgatatgccaatattcgagaaaagaccttgttaaataacaaactttgaaaaatgaaaaaaaccgctacatacttataagcgcaatttaagttctccaaaatatttagagatacttataatatgcacgtttgtatatagcagttcagttacaatttatatagttatattatggaataacgatttgttgaccgtttctaatattgttaccacttaaaccattggcacgtctaattttttcaacattttccggtgaacctgaaccgtagtattgaattgcgatacggtataagttttcttgaccattcactgtatgtctttggccaccaccttgacgttgttgttgctgttgttgattttgattagcttgttgttgattttgattattttgtgcttgattgttcgcttgattagcgttgttttgatcattatcagattcatctttagtcgctttgtcttgatcctcttttgatttatcactgtctgtagattttgatttatctttagaagcgtctttagatgtgtctttgtctttactttcatcagcattatttttatttgtattcgcgattttattttcttttgtaccattattatgattgtttaatgccatgcctccaaatatcgctaatgcaccgataattagtacagctgcaattaatggtaacaatactttggccatgccaccttttttacgttctttatctctgtcatgattgtcatgttcatcatggttttggcttgcattattagaggcatgtggttttgaagcggcagaagcacttttacttgctgcgcctccagccaaacctgctgttccagcaccgatcgctgcaccttttttgccattatgatgatctttagacttatcttgagacgctttatcctcagtcgagttattcgccttgccagaattacttttgttttgagcgtcatttgaatgtttcttagctttagaagcagccattgcaccagctgcacctgcaacacctgctgttccagcaccaatagctgctgcttttttaccattatgatgttctttaggttcatcttgatcttgttttacagaatcattatcatgttcattttttgatgtttctgattggttagcacctgttgtaaaatatggtttaggttgctgagattgttcagcttcactcttatcagaaactgttgaatgctcagtgttattttctgcatttttaatagtatcgtgtttatcattgtcttcgattggttctggatgtgatttatccattgcaaaagcattcttattataatattcctcttcatgttgaggtgtactgtcttgatggctaggttcttgactttcagtactgtgtgatgattcgacttgacgatcatctattgtgccagcctcattttgaacattgtcttcagatgtttgtgattcattgtgaacttgtttattatgattcgttgctaaatcacggcgtctttttcttctttgggcatttcttggcggaaactgttgctccgtattctctattgtatcctgatgttctaattctgattggtctttttcaacatcttccgtatggtcttgatgtgaatttgtgtctatcgattgacgatttttttcaaagtcatctttaaaattattagacatagccatcttcctttctattctattacaatgattttacataaaatatacccacatgacatatgtttatgtatatttttcaaaattatttcaatcatttttcaattgtgtatacactaattatagcttgtcaattttcttttagtaaagtaatactatctgagaaataaattttgcaacttttcatcaaatccaatacttctaattaccttcttcttatttaaaattgcgatatcagttatattagaatcattgtcacaacatcgatcttgtgccggtggatattcaccgaaaaattctaataaatacttccgtctacattgatccaatttgcaatagccaatcatgcgaaagaatcctaattgctttcgtttaaatgattgcttaaatatctgtttcaaggcgccgatactatagaatgattgcaacgttgtcaaaacggcttgtttatcgggagctaaaaattctcctatttcgaaattttgtacatcttcttctgttatcatatctgcaaataataacgtttctaaaatatatttatcgtccggttggaataaactaattgcctgacttagttcaccatcgcgacccgcacggccaatttcttgaatgtagttagaaggacttgttgaaagatgaaagtgaatgattgtgcgaatatcttttttattaattcccataccaaaagcactcgttgcgactataatcggaatatcattatttaaaaattgttgttgaactgtgtgtcgctcttgataattcatatcaccatgataaatacctgtaagaaaacctgaatcataaataagttgcgctaaattcagacacatctttttcgatgagacataaataatcgttggtcccgactgttgtagaaacggcagcaaccattcaattttatcttcatcatcatgaaaattaagatgcttaaagcttatatttgggcgattcattgtagttttaataacattgaattgaatcgctaacatttccgtcaaatcatcttgtaaatgcggtggtgcagttgctgtcaatgctaagacaaccgcttctttaaaatgctttgttacttttcctattagagcataatgtggtctgaaatcatatccccattcagataggcaatgtgcttcatctagaacaatcatgccaaagtctatcatagatattaatttaaaatttgacggttgcaggagaaattctggacttagaaagatgaagcggctatgtcgtaaacatttaatattatgctttttctcaatttcatccataccagagtgaatacatgttacacgtttttctccatttattttcaactgcataacttggtcatccattaaagatattaacggtgagataattaatgtcggcttacctgataaatacgtaggtatttgataacacaaactctttccacttccagttggaagtatacctagagtgtgttgttgagacattatactttctataatttcctgttgtcccggtttaaaactctcgaatccaaatttgtttcgtaaaatatcatgcaacattcagatcacctctttcaaatccaacgattaatacttttaattgaaaatatgataacgtgtcaaattgttctttgtaaaattttaatcgttcgccacgatgctgttgataaaaattcaaaaactggagttgatcttctagttcaacataatcatcgtaattagacatgtaacctttgattaagatttcaagtacatgatcttcgatagtattgattttaacttgttgttgagccgctatatcttccatcgtgaattgttcaagcaattttgtataagtaatataagtttgatttaataatgtaggtttcattattatttttgataaaatagtatattctccactttctaattcaaacatcattgtcactaaattattcatttcgtattcaaacaattgctgttgagatagcttttctattaaactaacttgctgtctcgtatacattggttcatcatagccttgcaaataataatgtaagtaacatggcccttttaaagttattgctttaaacaagttatgtagttcattttcaaaatcaatttgtaattggttttctttaatgtagttatagacaatctttacagtttcttgtatcttattattttgagagattggtacaaaatgaaaaacatgttgtttggtattagacatggtttgcactaatagttgaattgcttgaaatgtttgccccatgctttcaaatgtatatctaggatgcaacatgatttccatttcagcattaaattcattgattttttctaaaaatagctcaaaagacggatattttaatagtggtaaactgtgatataatgacaactgttgttgactacaagcgtcaaaaaaggtttggtgagatttcttaccaactaagatattgtaaatacttttatttgttttatagttaaatgtttgttgtaatgctgtttttataatgtgttgcaaatttaaccctcactctgtaaaacggataatttgaaaataaaaatgatgctgtctaaaattttagtcacattactattttagcatttttatcaaaggaggcgaagacattggcaaaatatacaatcgttgatatggatacttgtattgcatgtggtgcatgcggtgcagcagcgccagatatatatgattacgacgacgaaggtattgctttcgtaatccttgacgataaccaaggtactgcagaagtacctgaggaattatatgaagatatggaagatgcaattgatggatgccctacagattctattaaaattgcagacgaatcatttgatggggacgctttaaaatttgaataattgattttttagacaaatgttctatagaaaaagcaggcaagctatcgtttattgatagtcacctgctttttattattatgtgtatattattttgctttaatttgattaaattcttttcaagaaattcgcaagccttctatatagtaaaataaatacaatagaaataacgatacctttaataatattgaatggtataattcctgaaacaatgattactttaagattatttgcgatatcagctaagttaaatatcataccgtacaaaggtaatagaacgaaatagttcaaaatactcaacacgatagtcataacgattgttgcaatgattaatccagtaatcaaagattttgttgaacgtttatttttatagatggcgtaagcagttaataagaaacttgcgcctgctaaaaagttagcaaatggtccaactggatcgcccatactaaataagtagttcaataaatttttaaccagtgcaactacgataccggcaactggtccaaacgtaaatgtagctagtagtgacggtacatcactaaaatctaaagttaagtatggtggcaaaaatggtataggaaacttgataaaagttaacacaaacgcaatcgcgctcaacatacttattgtgataagacgtttattttgttgcatattcaattttctccttccattcatctcgtaagaataggaggattattgcacaacaaaaaacctccatcttctcccatccagactatactgtcggctctagaatctcactagatcagccactaatatgatacatactagcaggtcgcaggctttatttactgccggttgggaattacacccgaccccgaagatgaattttacattattaaatttaattctcattaattttatactatatatcacaaaacctcaataactatgcttaaattaaatcatagttacgtaattggagagtgatacattggtgatttgcgagcattgtttggaatgttgtttgcttgattaatttttgagatggcttttttgattctatcactcaattgagtaaaaatcgtcataaaatggaaagcaaattataagaatctagtaggttaaaaagttttatatcagtacttccatttatattattatttaaatcaccagaaattacacttaaaatcttctacttatttgccttcacaacaatagtagaattatctttttattcttgatctactcaatatacactattctccgttaaattttcatcattaattttattcttgatcaaacacaccatattctgaagtgctttcaccgttaaaatttggtttaaccgtatttattttattgtccgaaaattttatactaagctctataccgtttggtatctctttatctttttttatttcttctgccatttttattacattttcactgttactttttttagtatagttcttttttttactaaatagagtagtagttaccgaaactttagacttatcttttaattgcttcttaacatttgacaattcttttgaaaattcactgtcacttttgtttaacaatggttcaaaatagtctctatactcagctaaattataaggtatggccgaaatataaaaatattcattttcataaccactattttgcgtcttattaattgcttcttttgtaaatcctgtatattgatatttctcttcattatctttgaaaaatttatataatttatcatatttttctttttgtgctcgatattcaaacccactgagtactgcaccaactaaagtactcatatcatcacctttatccttacttcttaatgagctatcactgtcaataattgatttatcaaatggaatactcgcattaaatacgatgtcgtggtcatcacaatgcacgaatacttctacaccatcgccactacctataacatttgtagctttaacttttagaccgaagttatccataaaaaattgttcgcctcgcttagcaattttatctttatgcttctttgcaaattcaatcgcatctttttctgcaggtggttggaatccttgtcctacatattttgaagcatccatttcttctggtacagattttgtttctttgttggattcgttattggtagttgaacatcctgatagtagtatcgttgccattaagataaattttgcttttttaagcatatctcatcacctatttatgcgcttttaaaagtttcattttgtaaataattatactctcttaatttatttgtgtcttttagtttctctctatataaatcttcaaatacatctgcctgcttaaatcgtttttcgttaactgtaaagtcattatctttattgatgtcttgataaaccctatagctactcaattctgttaaatctctatcatttattttattcatcttcaaatgctccaaacgacactactttcttatcatcaaaacgagctttttttgtgccaataagtttatttcctaattgagtagttatagtattcttgattggcatatcttttgttctttcaattttctcggataaatctattacattatttatcttttcttttctattcctttcatcattcgtactaaacaacgttgctacagtatttgtattagcagtatagtttagctcttttctagctcgttgcataccttctttaaactctttatcatttttatgtatcaatggttcgtaatattttctatattcttttaaatttcttgataaatatgtaatataaaaatattcattttgatacccgacgttttgcgtcttgttaattgcttctttagtaaaacctgtatattgatattgcttttcattttcttttaaaaatttatataaattatcatacttttctttttgcgctcgatattcaaagccactcagcactgtacccaccatcatactcatatcatcaccgttgtcattactacgcattgatcctttttgatggatggcatctttgtacaaaggtagacttgcattaaatacaatgccatgatcttcgcaatgcacataaacttctacaccatcatctttacctacaacatttgtagctttaacttttagtccaaagttatctttaaagaattgttcacctactttttcaaattctttacgatgcttcttcacaaattcaatcgcatctttttctgcaggtggttgaaagccttgtcctacatattttgaagcttccatttcttctggtactgattttgtttctgtatttgtttctgtatttgtgtctttttttgattcattattcatcgctgaacatcctgataacagtagcgttgctattaagattaatttcgcctttttaaaaatagctcatcacccatttatgtgtttatatagaatattaaaaagcattttaaaaaaaatttattcatctttacgatacactccatattctattggatcattatcatcataaaaggcttttttagtattaatagtaggctttcctatttgaattgtaattgtagatttttctggcttatttttaaaattatatagtttatcactcagttcaattacatcatcaactgtattgtctttagtaaaattttcctttgtactaaacaatgttgttactgtatctgtattagcagcgtaattcacttcttttctggcttgttccattccttctttaaattctttatcatttttatgaatcaatggttcgtaatacttacgatattcttttaagcttcttgacgagtaagtgatataaaaatattcatttttatatccgacattttgcgtcttgtttattgcttcttttgtaaagcctgtatattggtatttctcttcattatctttgaaaaatttatataaattgtcatacttttctttttgtgttcgatattcaaagccactcaacactgtaccaactaaagtactcatatcatcgcctttgtcctcacttcttaatgagctatcactctcaattattgatttatcaaatggaatactcgcattaaatacgatatcgtggtcatcacaatgcacgaatacttctacgccttttccactacctacaacattggtagctttaacttttagaccgaaattatccataaaaaattgttcgcctcgtttggcaattttatctttatgctttttcgcaaattcaaccacatctttttctgcaggtggttggaagccttgacctacatattttgaagcttccatttcttctggcactgattttgtttctttattagattcgttattggtagttgaacatcctgatagcagtaatgttgctattaagattagtttagttcttttaaacatagctcatcacccatttatgtgtttgtaaaacttttatgtttgaaaaagctacttattctcaatgaaaacaagtagcatttaataaattaattagtatacagctagtttttctaattgttctttaacttgaattaagtttgaccgtattagagaggcagattgatccatcgtttgaattgcttgtccttcattttcgttcaagccattacaaacaacttcaaactgttgtgccatttgatcaagacgcgcatgagcttgtgtgtttaaaataaacatatcgtcataatgtgatggcgaatagataattcgtcgttgtatacaaacgtataaaaaccttgtcatatcaacggttttggcatttttaaacctctgtgttttccacgcatgtttgcccttatttaaataatttgcccttttttcgccccaaaaaaaacacaaaaaaataaccacactcctaaattaataggtggtgtggttttgttgattgtaggggtataaaaataaccgcattattaaagatacggttactctgttatctgtaaatataatagtagtttaaaaattagtcgttattgttagttctttttttatctgattcttttgtttctcctaattcgcaaacaggactccacataaaaatcaactcctttatataccataatgatactatattttctagtttatttcaatttttcagtttttaaaaatgagtttctgtttttatttatacgcttttctgttttctttttaaattttatctttttgttattccattcattgtaaaattctattaaattaacataaaatttttcatgccctattttatttgttgatgagatatcaatgtaaagactcaatattgtttttaaatagatttgatgcaacgactgataaaccgtattactatctgctatgttattggtaaaatgcatagaaaaatattctaatttattcatgcaatatatatgggtttcattatacttcttaatgagtgtatttataccttgcaatacgtcattacttttaataacaatttctttttcacctgtcgaaaaagtccactgtttatctcctatattttctttaattgttttcttgttgtcaaattctaaaattatagcccgtaaacactcttctttataattctcgttcttgaaagtacgaagcaaaatttttataaattcggtattggtgacttttttataagtgtgatattttgcaatctctttatcagtaaagactgttcttagttcgtgattatcaaaacttaaattcatcttattctctaattcattaattttatcttgcaaaccaacattttctaaaattttcttgtttatctcccctatatcaaaactccttttcgaaattaattttgaaaactcgtctgccatttcaacagccttttctttccttttataccttttgttaaatttatgaaccaccgttgcagcataatacgatatcccaccagataaaatagatgatattatcggtatgtatatatcacctttcatatttccacctcttttaacacaattaagtattatgatacacaacttgcgcaaaaagatgtagacagaacataatggcgaacaaaaacaaccacccagtaactagtatgggtggcgtagcgactataacaactctatgttgttaagatatatgtatcgagtgatgacaaggaagatgtctcctgtgggaccaacagtcagatacatggcctctgcccggctatatagttcactcctactatatacgcatgtaattataacataaaaaaataggcaagtaccgaagtacctgcctgttatgcacatttaaatcttgagagtaatgttatctaaagaataatgttattatatcacaatacaacatttaagcaaacattatattaaaacacttctttcacaatcaatctctcatgccatatccactcattatgattgttccaataaatgcgacaccaaccatctataatttcaaacacatatattaatgttccaggcgcgtatacagcctgtccaacatcgaatctatagttagtacgattatcaccgtatctagtggctgaagtagcacctaagccgtcgattttcgcattaaaataagcaccttttgaccatttaaggttataaggcgctttacttccaactgttattttacttgcagatttaccgactgctttttgagcaggtggtttaactttatttgtgatcttattcattaagccctcacttttatacttaggtctaataaagtgagtacagccgtaataattatcccaacgtaactttgcaggcgtatttgcgttaccgtcatagttctgttccaaaattaaaaattgatttgtattaccaccattaaacactaaaccaatatgaccgtattgtttatatattcctttggtaaatacagccacatcacctatttgtggaacaaacgatggtgtgttttcatatactgttgccatgtttttaaaatcgttattgattgcatcttttgcatttccccacattctaatttctaacaaccaataaatgtaatcaactgctaaatctgcacattggtaaccataccaaccgtcaaaatcaatatatctaccttgataccaacgtaaccttgctcttgcttcactgtatgttttcattattttacctcctagtattttcttcttggttcttcatattctaaagcttggtggctatcacctatacctttagtagtcgggtcttgaatcacaccagttaatactaaaaatcctaatatagcgtttaaaccgtctgttaattgctctgtataaacttgaatatcatacccaatagctttggcgatgttttgagcaaataaaaagatagctgacaatatcgctacccaaaatgatttttgtttcattctaattttccaattaatcatattcttatctccttttatccaaaataaaaagacgactaataagccgtctatttgatatttatattatggtgtgttaatttatatatagaaaaagggcaacatgcgcaaacatgttaccctaatgagcccgttaaaaagacggtgactattttagattaaagattaaattaataaccatttaaccatcgaaaccagccaaagttagcgatggttattttttattgcttaattcaataagcttgattactagacctatcaatgcaataaggaataaaccaaactgcaacatggtactaattgtaatcattaggcgtctcctttctaaagatttcagtaatgccaccataggcaccacctccttatactcagatagccaccatctatccaacttgctcacttctgcatattaccataattacaacaataaataaaaagtcagtaccgaagcactgactaaaacttatttacatttaccgaaccaaaaacatgtccagaaactataaccaaagattagtttaaacattttattcacctctcttatatgccaaaaatagtttttaacaaggctataacaaatgtacttagaatcgtccctattaatcctagaatccacatcttgatgtctctaatatttttagcatttttctctttatttttttcatcttcttctttgtcacgccttagttcttcgaaatttctatctaacttgtcataaattttttcttgcgttctcagactgtcttctattctgtcgaatttttcaaacatagtcttatcattttcttctaatcgcgttaaacgccaatcttgttcgtgtcgtttggtaaatccaaacattacaccacccactttattcaaattaaaaagccataagattataacctatgactctagattttctggatacttttctcctgtaataattgcatattcctctttatctataacttccatatctacataccacgctatatcttctttactatattctttcaattgataccatgttttaatatcttcgaatgttggtgaaattaatttaagcattttcagtctctcctttaacctcttctaattttttattaagtgtcacaagttgttttgccattagtgcattttgcttattaacttgcatcgataactttgtactttgaacaacttgtttctgcatactagcaaccatttttcgtaagatgtcatcagaagcgactgtgttttgttcttcactgtcaatctgttgatgcaagtcatctttttcttctgaataatcttcgttaaaaactatttccccatttgaatatttaaaggctttaggtctaaaaacttgagagaaattttctggtaaattttcaatatcaataccttcttcaaagccaccaatgatagcgtatgaaattatctcattacgcttgttaactaatatttgcattattttctaactcctataattttgttgattgttcctctatttgcatttgcaccagaacctcttcgacttcctaagtcaaaataaacatcgtttgatatagttaatgatgtacgactagatttagttaatccaaactcataaacgcctccaccgtcaccgtcattatccggtaaatttgatgggttcaatgaaatttttccgccaccaaaggggttgccaaactcagtaaaatctccacctggaaaagttccataaaaaattaacaaaataaattgatctaaactttcattaagatataatgttgagccaacgccatttgccgtcccatcaaaaataactgaatatcttttattaaacttgtcatctgtgtatagtttggcattgctttcagccgtgttagcctttgattgcgcgttttgaacagtttcaaaaggtgtgttgtaatcattaagcgctaattctgaccaatcagaccacgaacccagttcttttctcttaacaaatactttatttgtaccatttggacgatatgtcatacgtttgtagtcggaagttactactaaatattcgacagtaccattagtgcttgcacctcttggataatttatagcttgcgaaacataaataaattgggttgaatcgcctattctttgttctggattattaaaatcaaatccagtaatctgcattatcttaccatcatctttagtaatcttagctttttgccaatttgaagttgagccacttgtaaccaaaccaccactattcactgattgcttaaaagcctcatgtttctcatccatatatcgcttttgctcatcaaatgttcttgaataagactgagctttattttccaaatcggttatatggctattagcgagttgctttaattcatctatacttgacgattttgctatttgaatatctgatagacctttttctttagctttttcaatcagactcgcataatcttcaccattttttatagcctcgtccattgctttcgcgcgatccataatagttttttctaattcttgaaactcaacaatatagtgtagttttgtttcagagggaatcttgctaaacaaacttttttcaacgttaaatgtgatagttctctcgacaactaccacgtctgaattacctaattctgcaaccgaaacttgagcttgataacttccatctcgtttaattacatcattaggtaattgaaattttaaaatacctttaaatggatctaatatttctagtggagcaactaccatgactcctttacctcgaatcgctattcgtgctttgatattttcttcactcaataataacggttgattatttttagtgatattaaaaagaagaacagaagaatcactctctcctgttctaaaagttatatctagatttgaaatattttcataatgcgctgtgttttctaaatttatagctacagatttctctaaattactcattaacttataattctcccttcgtgtaaagtccatggccctgaacttgttttactatcataatttttcaatagtatctcagcagatgctgtaacactattacgaactagcctatgaacaaagccacctgtatttgaagcttctacatataagttccaaccagctacccctttacgttcagttggaaaatctgtaaaacgttttgtatcatccgtagttaaataaaacgacatgcctactatgttaatatctgacatttttgtgatgaatgaaggtactctctcccatttaccactatttttaggcacataattccagtccgaaatgtctccagttcttccagaaagcaccctttcaaaagtcatcatattccttgcataactattacgcgtcaatatctgaattacatcaccgccagtttgtggtggcttaacttccaagaaccaacctgcatcacgccattctcttggtaatgggaaatcatcgatttgaactgtatgatcagtgtataaatagtaaagacctggctctgttaacatcccaagattcttaagtttatcaggcctcattggtaaaggtttaactctaccacctgtgtcactcatgataaaaggaacgcctcttgagtgaagtatttctaaaatacctctttgcccaatcatgaaaatacgatgtgttctatttccatcaccaccgacagtaacacctagcatcaaagcttttttaccactatctttgtcatagtatatttgcaaaccttctgcttccgcaaattcgccaggaaatgaatctagtgttccaccatagtcagcattaacctgatacgcttcttctcctgtttctaaatcgaaagccgttaaatagtttctattatttggattactgtctcctgtataccaatacaagtatttttcatcaaaagtcacaccctgcattggttgggtttcgtttgttagtctcatagggatactgattttatgcaaaactttatcaatatttttatcaacatcgtctaaacttcttatctctatataattcattgagttttcaagttcccactgacttctaggtctctcaattctgtatagaattttattttctttttcatttatgacaggggtgatgtagggtttttctgggtgtcctgtaaatacatcttgcataccatacttgccatagctaatttccacattaggcgtatacttgaaacgaactaatgtattctcattattaccatttaagataaaactataaatccataactcatcatcaatatatctataaccgttatgtgtaccatgacccccacctacaatcaatgagctgtctataaattgaccattaggtcttaaacgacttagcatatagccattatttctagcttgtgtcatgtatactatgcctgttctattatcaaaccagaaggattgcattactgcatttgtaagaggtgcaagttctgtcacaaataaaaactcttgcttatcaggttcaaaacgatactcgatatcaagaatttcttgtttggtcttatttaattctcttatagtttcctctttattaatttgagttttggtttcccaatcgtctaaatgttcttttaatgtgtcaaaggtttcgccgtttacattaactcgagcttgaacaatctcattagcactgttattacgtggtgccacaacaagtgcgttaatttgactttgtaaagatttgtttactgctgcttgcgatctaccattataataaatttgctcagcgaagtgttgcattgttttagctttctgatgcaacttaaactctgttgtcaagccaagcgcaaattgctctattctttgcaggttttgaatttctttagctctataatctcgacctgctaaagctcccaaatcctttattaaatacaaattttccataatgcaccttcctttctaataaaatagcactgtaccaagtttcccactatcgtcaactgttattttccacaatttaccgtttggggatttctgtacaatgctattttgaataattcctgcttcgcctatttttaatttatctaatttatttttatcatctaccgaaatgataccgtcttgaggcaatccatcaatatcactactgcctgcataaggtatcccatttatagctttccagtgtgtagctggaaagtactgtttatcgttttcaagtagcgctttgattttaacttcttctgttgccattatattaatacactccctatatccattgtctcgaaaggagaattcaaagtactagtgtataaatgatttatacgatttgcttgatagttatatctattatcttgtgcaataactcgtctgttaagtgcttgttgaatttgtaccatatcttttatttcattgctgaaagacacttcatctattgcgtttacaaatggatgtgacctatcaagtttaacaacctttaattcagtgttatatcccattaattcatgaacaaaaaatacgctatctcttggctctattttttcataacctatataattaacatctaattcagtcttaggagtatcatttatttgcttttttgcaaattctaacagcttatcctgtgtttcgatatcttcatttgtttgcgtattagcatatcgaatcccaaactgctttgcactatctgcgacgtagtcgacaattgctttgtattgattgcgacctgaattatcagcaattaaatttaagactgttgatttttcagttccaacatacatacaaggcttagcttttttatttgaagatatatcaattctatttttggggtcttctcctaaaaatatcatttctaaaacgtgcttgcctttatcaatattttttattaaatctattgtttcagactgaaccgacttagcaaaacaagaaatttgcttaatttgcttgccgtctaaaatcaacttatatattccaccttgagagcccttttttattgtaaatctaactgtttcattaccatacttgcaatcaaagttaatagtagctttagacccaattgttgcggtacgataagtaccttcttttataaaaccatttgaatatttaatgtcagttgttctaataggattataatttttcttttcctcagctgtatacttttttccaaaaacttttatagctgttcttaattccaatgtactgacagttgcagatacagtatcagtattatattgatatcgaatcactttctcgcttctttgataaaatgtttcaggagaataaaaacatatctccgtatcatttggataaataatacaaccaaacaaatctactgcttctttacaatattctaagccatttttattacctaattcatcaattggtatttttcttttaaaatctccaattattttataggtcatcttgactgacgttttttgatttgcaaatccatatcttaagtactcatctaaagagtattctggcgttttaccagtttcgctactgtcgtcatcaagcttatttgattccactgagtgattttgaaattcatacattatgtgatatgccgtaacttcaataaaaactttatcaccttcaacctttggcgctgtctgcttaattgtatatttttcaccatgataaattatgaagttttcacaaatcaataaatcaaaaacaaaactattatgagtagttctataaactgtaaaggtgatgtacctagcttcattcagttcataatattctttaaaagaaccataatctacatctagtaaattttcacaaatcaattcattaaaatccattactgataaatgatcatgataatccattaaatcacctacctataaataaaaggaaacttaaatgtagttttaatatcactgacgtctcctttaatcttaaattcatttttacctggcgctaatgttataatgcccctatttgtatcaattcccactctatttatatctcgatatgcatacacaccatctaaaacaaaatcagtgtttttatctatacttttgttgtacttaaaaatatcacctgttgtatagttaaccagttcaaatcctccactcgcatttaaattaattaatattttcaaatcgtgcttgaatcgtggatttatcgtatcagtagaaccgttccaaatagtaaattgatttgatgtatgagtatatttaggtgtgaaatcaagaggaattccattttcaaacatccaattagagtcgaataagaactcgctatcggtccaattaactgattcagaataccctttataaacatttaaacttacttcaatttcagttgaagaaccatcttttaaattagatgtaacattagctgtattcactgcatatttaacaccaggcatttgagaagtaataacataataaggatgtctgcgattaaacacagatctaaaccaatgctcaaataaatttaaatctataacatctataccatcatagccaaaccttaatactaatgaaaaaggcgcaaaactaattgcgcccggtaaaataccatctactccgttaatagttacactgttatcattggtgtttggactttcagcccttgcatctaaaaatataagctgattaaaatctgttattacttcttccttgtaaccatctatgatttttacaaaagattgcattaattagtcaaacctcccatataattatttgcatttgctctatgcccactttgttttgacaatattttttctaaacctctaattgcatcattagaacctaagttattatcctgagaagaaacagtttgaatcaatgcatctgttaatttatttcctttatcacttaacataacaatttgtttcaacaatttttcaactgttgaagtatcattatttacagtgatgttatttggcttgccatccataccgatgatgcgcataacctgttcagttaattgaattgctcgtttacgtctagttaaagggataaccatctcctgtttatctccttcacccacttcagcaagttgatgctttgtaatcaaaccaccattcgcatatcttcttggaccacttggagaccaaccacctcttgggttaaactgtgagcgccaatatctgttgttaaagaacgctaataactgatcgtaaccactatatatattgttgtgacctctaacagcataatgtctaaatgtttgtgggatatattgaagcaatccttttgctggattgccctgtaaaacgttgatgtctctaagcgcactagattgagttatacctgcatttcctcctgattcgtgttgaatcaagctaataatatttcctacatcacccgaagtaacattaacacccattcgttttgctgcacgacgtatatcgcctgcccaagcagatgcagccttattaacacctgaaccacttcgaacgccactacctttaagtgacttcaaccatttttctggatctttagctgtatcattccctggatgtgacccttgcatcaattggaaatgtaagtgtgctcctctaacgaaattacctgtagcacctgatttccctatcagttgaccagctttaatacgttggccttgtcttgctaattgcttagataaatgcatataccagttccattcattagcaccagtcttaatttgtatagaattaccgccaccgtaatcagtccataccttatctgctataccacctttaacggcataaacgtttgttccagaaggcataccaaagtctataccatagtgacgaccgccattaaagttaagtccacctgtgtagcgtccaaatctttgccagattggatattcaaatagatagcttccatcgcctccaccaccgaaatcttcaaaccacgattttactttgtctactaatttctttttgagcaatgagtatgcgcctttagctatttttactgtagcgttagctccgcctccaaaattaatatttaaacctgacattactttatttactagtttccctggatgttgtacgtaatcccacacatcgccgattttatcgcctaaccaagatgcaccatctttgattttatcgcctgctgcttcaaccatttcttctgcaccttttttgatattatgcgctgtgtttttagctgtagctccaaattctcctgcttttttacctatattacctttaagttggtctagccaatctttctttttcgtacctccatgaaactttggtaaaacacccatacgctgtaacttcagagtgtcattagcatttattacgctatccccaactcctagtggaacaaccacatctcgtccttggggtgcatggaatgttccgtcagccctgtgaattacttcttgaactccaccacctggggcgtttccagaacctctatcatttaatacagcaaatgtcggttgcgttaatgctcccgaattatcggtagctacaccctttcctgctaaagtaccagtagacaatgtaggtattggcttgatgagatttttatcagtaatggctttagatattttattaataccgccaatcatgctattcaaaccgccaatagctttattagcaacatttttacctaaatcagccgcagctcttcccatgtctttaccaatatctctaatccaatcatatgttttggatagccattttctaaaaccattaaatactgatttagcgttagaccatgccgaacttgaaattgcatcaaaacgatcgtgggctcttgaatacatatccccagtccaatcttttaaagatttgtatgagttactaaaccatttcgatgttcctttccaaacggattttgcattcgaccaagctgtactagaaatattatcccatttcgcgcgagatttattagccatatccgttagccagccctttgcacttttatatgcattgctaaaccattttgatgtgcctctccaaatagattttgaatgcgcccaagctttatctgaagcatctgaatacttttgcttagtttgattgtaaatacttcctgttgtcgatttaacagattgccaagcttttccaaaccatttaccagtactattagctatagccttagtgtggtatcctacagaacttttggctgagctccaacctgaacttaatttgcttggaatccctttgattccgctccacatttttttcatttcgccgccaaaatgattagcatttctgcccattttactaaaggcttcgccagttttactttttacgccgtcccaagcatttccaaaccatttctttatattttctctgtttctacgagctgtttcttcttgttctttagcgtatttatcgctttttttcttttggtcttctctaaagttagaccaccaacttttaaggccattccaccacttttcagtatttttatatacacgtccactggataaatccatttctttatcaatatctttattttgctttttaacaacatctactacagcatcttttttagattttgcttttcttacttcatctttatgtctttgatcagcaatagctaacaatttatctttttcagacttagaaaggttgacgttattttttatagcaatgacatcatcttcatattgcttgtccacttctttttttcttgcttttcttgctttttctgcttctttaattgctttgctcgcttcgtctattgaataagcatttctgtttctttgcattcttactaaaatacgctcttgctctttttcagtcttactcaattctttaacagtgatatcacgtctttgattttcaagcttttcaatttcttttctttcattttctgaaatctgaccatcactcaaagctttttctttcaattctttgattttctgattgagttcttgctcttttttaattcgcaagtcatttttttctttagttcgagttaaaatgttttgcttttcttgttcatcgaatgcactatacttatcaataagttcttgagttttttcgagttcctttttatttcttttttctatttcagctataaggttattagataaatccgtttcaattttcaaaagtttttttgctttgtcttctgatatctgacccgagtttaaacgtactttttccatgattctgctattttcttcagaataatgcacatatttttctaaagctttttctgtttcttttgaaacacctttccctaacacttttacagtatcagacgcttttttagaagctgtgcccatggtttgcataaatcctttaaacttgttgactcctactttgagaaggtcatcgtcgcttaatgatttataaccatctttcatatcttttgaaaacttttctttgaagcttttgccgatacttccaagatagtttttaaactctcctagctttctaacagcgccgccaataattttaccaccaaaaaactttatagtttctcctaaaccgttaataccgtttctgaaccattccacacgatcatatgcggttttaaaaactttatacgcaattgtaatagcagttattgtagcacctataggtcctgttaaaaaccttaaggctacacccgcaaatcttgcgcctccacttactgcaaataaagattttgcagctaatcctaaaccgtttttcaaaagtttgaacggtaaaattgctagctttgcagaatttttcaaaacatttataggttttaaattaaacatcatagctccggctaaccctttaaagccttttgacgtttttcctgttgtagaaccaagaaataatgtttgaagacctaaagatttcattgcttttgaattagtatttgaaaggattgtattttcagcaatacgtctatttaatgacgcatatcctttagcagcacttccaactgtacgtattaataaccctccagcaagaactgcaggtccaattgctgcaccaaaaagtgctaatcctactgaagcttttctaacccaaccagggagatgtgtaaatccatcaactaattttgttaaaccttccgctcctgctctaatcataggcgttaaatctttaccgacttcgattgctaatgattcaaaagcgccacctaattgttccagagcgcctttgagattatctttcatcaaatctgctgcttttttactttcgccattggaattctttaaggatttactatagctattaattttatctggtcccgcttcaatcaaggctaaaaatccacttgctgcttcagtaccaactattgtagccactgtagctagtttttgttctctcgtcatgcctttcatattatcttggaactgtctaatcaattcacccatgccaacaaattgacctttagcatcagacaaatgaatacctaattttttcatttccttagctgtatttttacttggattagctagcctgataaatgaagctcttagggcagtacctgcttgagaaccctctaaacctgagttagataaaacttcaattgctgcggaagtgtcctctattgaaactcctaatgcttttgcaggagtaccagcatacttcaatgcatctcccatgtactgaatatctgcagcactatcatttgctgatctcgcaagtaaatcagcaacatgatttgcatcagatgcttttaaaccgaaagagttaatcgctgaagccattacagttgcagttgtagccatttctgcaccacttgcttctgctgcactgataacacctggcatagcctccattgtttgtttggcattaaagcctaaagctgccaattcttccatacctttagcaacttcgttagcacttttactggttttagctcctaagtcaactgcttgattagacatgcttttcaagtctttactgcttgcttgcgcaatcgctccaactcgagacatttggccttcaaagtctgcacttgtttttaatgctgcacctaaccctaaagtaattggtgtagatacgcccatcgtcattgtacgtcccagggaagtcattttgtctccaatagaactaaatttctttgacatgacatccgcttgacttgcaagtttaccgaaatgactttgagctatcatttgttctttgttaaaagtcttcatttcggatgaagctttatctattgaacgctccaaattatttaaagcagctttttctttattaacagctgtttcagcttttgcgacattagcgctatgattcttaatagtattgtttaaatcattaaattctttttctgtttgctttaatttagtattagttttagcgtaagaactttcaattttatcatttgattttgaaagattgtcattttgcacttttagtttttgaacttgattgccttcttgtttatattgttcaacaagtgctttatgcttagcggactgcttctgtactgcgtcacttgctctttttagttgtgcagtagtagcttggttactattcttaagcttttgttctgcatctctcaactgtttaagtttttgatacgcatcttgtttacgttgatttgtacgtttatattgattttcagcttttttaagttctgtattcgatgattttaaggcttctttagatttatcaagagctaatttttcttttttattggcttctactaactttaaatatgctttctcaacatcttttacactggatttagctttttggtaattagcgttaacttgtttaagctcatcttctacttgagaatacatctttttttgaactttaagcctatcatttaaccccttaattctcgcctgatatttttccattgatttttcagacttatcaaatgctgacagattagctttcatttcactattaacaacacctaattgtcgctttaaacctttcatgccttcttggacacctaaatggtctaatttcagctccaaggtcatgccttctactttttcattcatattaacctcctttctagcttccaaaaagttttcttaaatccgtacctgtaatgactttttgttcactttgtttttcttcagtctcttctttattctcttcattaagtatttctaaaagttttacatacggctgttttctgacttcagttaatgtccacccatactgctccatacagaaacgttgtattttcttaatgttcgataaaatgtcttttattgagattgttcttctgtctttcccatctcttctggttcagtttctgaatcttcttcatcttcaccattgatttctcgaaatatatcttgtaaggcttttgtataagttttagtactcatcttgttcagaacatcttcttcagtcaatccttcatctttaaataaatctactaataactgtcgctctttttgtctcatttttgttgcgttaggtgcttcttttttattctcttgatttactaattctaaatactcatagcatttttctgcttcgcccattgttacatcttcttttgtatagctctctgtttttcctgttttacgatctttaatttcaaatttaatcattgtattagctccttttattcaaataaaaaagacgcagatatactgcgccttaaatccctatccgtttgttactgtcactgaaatttgtcctgacttatcgcttccatcagtagacatagcagtgattactgaagtaccttcagctacaccgtgaattgctcctgtattttcatctacagtaacaaattctggatgttcacttgtatatttcaatattttattcgttgctgtgcttggtgcaatgtttggctcaacattgtcatcggtatttaccataattgatttagtttctggtgtaaatgatacgcctgagactagaattggattggttttgaattgaggtacatcaactttactagattctttaccattttcttcccatgccacttggtaagtaccttttggataagttgtatccgcttctaaattagataaagttactgacactttgccttcaccttgttcagaagctacgacgtcgtctcctttataaacctttaaagttttagtcataaattattctcctttgatttattttgaaagcccctattctgctgaaactgttgcagattttgaattaactgctacttcaacattttggggattagctgggtaacgaacctgcagaatcctctgaatgatcttcactgtccgtgtatccaacgaatacttttttgaagaattctgcttctccttctttaccttcatgataaccgtatacaataccttgtgacgttccatcaacatcaacttttctattcatccagtcacctgttaattttgtaggttctggggcttctgctttttcacctcgtgttttaaattcaattgaatctaaactaaaagtacctttaagtaaggctacatataccggctgacctgttaaaccatcttccgattcgccaattactgttacatacggtgctcttgtattctctcctacccaagatgtaccatttttatctttagtacgtccaataactgtgtttaaatcatcacttggaatattgaaaatactcatgtcagacttaacttcattagtaccttgttttttcatccatacacgtttgttagatgcaaacatatctactaaatctggtgctaaacctgtgatatttaggtcaactgtaccacctttttcatcttcccatgtcatgcgtttaactacttttgttgcttctgggttaaaaactccaacgtataatcttttaaaacctactttataagaaccttgtccttctgccattgcttatttcctccttaaaaattaaaaagcacacctattcgatgcgctgatttttataatatatatttttgggtatgccttgatatcgtctcgacatcacataacgtttagtttcttcaaaataagcatctaactgactagatgcttgaattaaattttgttgatataacaggtatcttattcgttttgttatatcaattgttttctgattatttgaagattctacatctatttgaattaagtattcttcactgagatatttatcagacataaagtctgaaggcaaatcataaacaggtgtaataacaacaaagggtttggaagtttcagcgttttcagtgactttgtaatagtatattctagaatttatatgtgttttgagctctgcatcagataataaaattccttttatggtgtttaatatattcatttatctggccaactccttttttataatttctctatacttacgttcgctagcagctaatgtttttgcaataactccaaaacctcttggtgtatatttttttccatctcttgtataaccatgttcattcaagtgaataatgtttttgcgattcatagggcctacccattcaattaaaacagccctttcttgactgccaacttttgtataaggcttagatttagtcatttcttctatactggcacccgtatctttaaagctctcgaactctttctttaaagcctttataaaaaattcagatgcttcatttaaagctttatcactcttagcctgcattgcttgtttaccgtataccgattctaatttattcaacacttcaggtatccctttaatttctacactcatttttctgataaaaccactgtattatagccaatatctggtgtatcaattcttatttctacaatgttgaataatttatcggaatataatgcactgtcaattttaactaagtgatttgtttgtggtagatattcaattttagaagacctcataattatggttagtcctgactttgattcagtcgcttttaaaatttctctatctttcatagaaggattatatattttacaaaagcaactatacaatttcattttttcctcttcatctggatacggccctttatttacatattgaaaaaaatatgcgcgatctttaaattcattaaattccatttaaaaatcacctaccacttttttaatttcaaaatcattttttgcaatcctttttcattaaacaccttgcttctagattggtcatttgagtatccacgactttcataatctcttgcaatgatatatttaatcgctgtacaaaaaagcgggtattccaagtcatctttgtcataatctggaaccccacttaatagtaattcagacttagccgattgaatgagaccttcaattaaatcattttcgaaattatagtcaattctcaaccacaatttaatttcttctaaactcatttcatcacccctattcggctgatattacagctgatttagccttagctgttacattaaccttttggggcttagctgggtaatggacctgtattttcttttgcttttgcaattctgaatgcactgtctaatgtacgttgctgatcataccatgctgttaatacaaacaaatattcgccttttttaacatctttatcagtgtcataagttgttccatcatagttaattccaaaataattgaaatctcccacaataggtttaactgctgcatctgtaaatactactggtttgccaaatactttttctgctggtgtgtcaaagaaatttgttgttccatttgaaagaacactaataattttgacataatctgcatatcgcatataaattgttgcgttatcacgataatcttcatgtaaatctgctaaagcgttaataatagcatcatacatgtctgctccctcaacttctttaacagatccattataaaatgacatgtgttctaatccagatttaggacttactgctaaggcatctttacgctctttagctgctaatcctgattgtagtgcgttttcaacccagtttactaaatctacatctgatccatgaattacagtatctgaaattgcagcaaatactttgaatttattagtagtgaacttgactgtatcaccttttgcttttaattcttttgctgtttctacgtctgtaatgaaatcatcatcgtctaaagtgtatgaaactcttggaatctctaaacctttaatgttagttagacgagctttttcacgtaattggtttttagcaaatggttctgaaacaatttctttagaaagtgtttttggtaagagcttatctccacctgaatcatttcctgttggtaaagcgtgtaataaacgttgtgcctccattgaaggtttttcaaattcatttggtaaaatcgcgtgacgataaaactctgccttagctttaaccatcttctcattatcacttaaagattgataagcttctcctttatctttaactttcgctttttctttctcttcaatgtcttgcacttgtctttcaacaatgttaaatctttgttgtaaacctgctttttctgtttctagttgtttgatgtcttccatatcaatatttggatctgttgctttctgactcaattcatcatttttattttttaattgttgtccaatcatacctaaggattgttttaattcatataatgtcggcacttcatttcctcctaataattcattgtcatttttaaaatttcgcattcgcgtttaattttttctcttttttctttttcttctagtgacatactttctttaggtgtttcaaccaattcagatgtatctacatcatcaattttagtgattttgtctacatctttctttaaatcttctgggacgttctcgaaacgcttatattgctctttagagatactagcagctatttcattagctcctaaaatttcatctatcaagccgaaagacaaggcttcttctgcagtaagccaagtttctgcatctaacatctgttttaagtgttcttgatctaaatcttttgctttatctaaataagctgaattactaacagcatctgttttttcaagtaaatccgctgtctttcttaattcttctgcattacctacagtcataacccatgaattatgaatcattaaaaaactatttttgtgcataaaaatagtgtcaccactcatagcgataacactagcaattgatgccgctaaggcatcgacatagatattaatttttgcaggatgcatttttagcatattgtatattgcatgcccttcaaatacactgcctccagatgaatttatatgaacatctatttcactgatgtctcctagttcatctagtttatttttgaaatctgtagcagttacatcactttcaaaccatttatcacttacaatatcaccataaataaatatttcacctttactttttgattttcttttcatttgaaaatacttagctttcattgacatttttatcaccacctttcaaagattttcttaattcaagtggcgtgtcaattgggtataaatcaccgcttattagcggcttatctccaccttcaactggtggtaaatcttcccactctctaatgtcatttatagtgtagtaaccactacgaactgctttaaagtacacttctgcttgtgttgcactatcagcccttaaataagatttaacgttaaatttaaaatacctatttttttctctgtctgttttagtaagtagtttccgattaaattcttcttcatactgtttgacgattggcaataaggtatgctgcaagtaaaatctgtttaactcttcatttttcgcgaaatttgtatttgatcttgcatttaagaatactgagggcaattgaaaaacgttagctactctttctcttgttaaattctcgcttgccactatatcttcagagacatattttttaggtaacggttcgatttcaacaccaggctcttggaataatattccaccgttttcttcatagtactgtttgaaatcttctaacacttgctgccttttttctttacctacattggaaccatatttaagcatgaaagaatcaggtttttgcatttctgtaagattaaaggttcttactgcattatcaaaatcagttgtattcttcaacacatcaatcggactaatgccttgcaccatattagatgccacgatgtgtttaaaatgcaacatgtccatattatgaacaatcaatttatttccagttgcagcatgaatggaataataaagttcacgtgattggttttcaattaacatttcaacaacatctggatttaataagaaaagctttgatggttgatgatagatgtctcgttcaattagcacatatgcattacctttttcatttctgattgtttcaatttgattaataaaatcaaaactgctcagagaattattcggtgacactgtaagtaaatcagatacttctgtattaactactttataatcttcatacattttcaagggcaaactagccatcgaattagataactttgtaatagctgaaaatatcgtttcattagtttcaagcgtattattgattacaccccaaaaagatttatttttccatgggctaaagtcataaagcttagaagctgactgatcaatccaattgtctatcaattttttctttatgcgtgtgacaatattctcttttgcgataacattcacctccttaacgcattatatctttaatactaataaattctatgtttccttcacccttgtcagaaacaactttattcataatatctgtatatgtgtttaaaaatgctgcaaagccatctattttacgatatctgctttgcttagacggcaaccagtttccgtttctgtctagtttcaactgaacattattgatataccatttcattaaaggattattattaaatattattttcccatctaaaaacatttcttttaaatccttcaatgcagggctcaaggtcaaagctccttgtcttgtttcttccgtttcaaacccgtaattttttaactcttgatttagtttgaatgcgttcgctctatcataagtaattttttctactacataatgctcattcatcttaattatccaatttaaaacatcttggtagtcaatataaggcttatcttgcactgttaataagccatcttcttcccattctctatagggtattttttcgttagaatattcaactttgtgcttaggaatccatgaatgcgataaaactgcaactttaccattatctaacgcaaaagtagcacacgcggctgtaaagtcctctgtttctgataaatcataaccaatcgtgcacggtctgccttccagctcttctaaagaaacaatttcattatttttttggagtgttgggtaatcaataaaactcatctcgtcattattagcaaagatattaaaccttttggttataaaatctccacgttcagctggtgttctcttagctttttcccactcttctttcatctcatctaaatttatagagacacctaagttgggatttgcttttatccagttcgacgaatcattaatatcatcgtcatcatccaaagatgctaaataataaaaagttctttcgtcttctatgatttgatctaaggtgtctcttcccgcttctaccatatcaacaagtggaccatctaattgataccctgctgtcgtaatgtagatgagaagaggttgtaaccttgcagctcttgagttttttataactgaaatcaatttatagtctttaaattcatgaatttcatcaaaaatccccatgtgtgtattcaatccatctaacttatcgctatctgatgcttggggcataatttttgatatcgttgcgtcataatggatttcatctcttaatgttctgaaatttttatcaagctttgggctagctttaatcatcgccttagattcatcaaatagaatcctagcttgtttcattacgtttgctaacaaatgaatttctgcaccattttctccatcttgtgatacagcatagttagcaaccccagaaatagtggttgttttaccattttttcgccccataaatatcaaagcttctttaaacctgcgcagttttgtttctttatgaacccaaccaaacaaactgccgataataaaatgttgccatggctgtaatacaagttgacgtttagatcctttggaaggtttacaaaacttttctataaatcgaataggacgatgcgctaattcttcatcaaatacccatttacctccattttctagatatctaagatgtctctcacattcttttctaacatatttgcttgtttttattttcccttgagtgacttgctctgcataccatgttgttaatagttttggtgaaggttcatttaaaactttaatagtcaccgaatccaccttcttcttgaactatcttttttctttgtgctgcagttaaacccatagacttgagtaagttatttagtgtttgaactgtttttgtcagttctatgcttaatggattcttaataatattgctcgcaccagccttgtttgtatgctctatcattaaatcactatttttaagttcatctcttaaccgacaataaaattcatatgtttctatatacaaattaattaatatgtcatcagattttttgtaatcttctatatattcttttagctgtttttttgttaacttcatataaagaccccctttcatgaaaaatttatccgcgttgctagcgtttgggcctctccggtacccggcgaaaaaacattttaagccgatgggcaggggggcataaaattttatttaaataatttttttatttaaatttttagaactctaattttcttaagattacttttgtcattatcatttgcatgaattttgttatgacagctataacaaactgacattagattatctaagtctaaagctttgttaaaatcttcatcaacataaataatgtgatgcacaatctttgcatctgttataatatcttcgcgtaaacacatttgacaaagataattatctctatctaatgctatctctcttaacttcttccatgcttttgaatgatagaaccaatcgtattgatatgacttacgaccatgcttataaatgttattatgcttggtcatctcttacacctctttgattgcataacaaaagacacaccgcttagcgatgcgcctcatgtatttatgtcgtataactttcagataactttatacatctttccgatactatcatattactacagatttgtaggccttttgcacaatctttgcacaatgttatttgatacctgcatgatacgctatcgctttaacaaagttctttcgtattgtagtaactgtattgcgatgcatgtgacaagcatcccctatttgttctatctttagcttcttatctttattccaatactttaaccttattactttcttatgatcttcaggtaactttaagtactcactttcaactgcttcaaccatctcttctaagttacgtaacatcttattagtcaataaccttgtcgccattaactcagttgttctaactggctctcctttttgtaacggtccatacacaatgttggtgtctagttctttcgttgggttaagtatctccattctcaatctatttatctctttcttgttctcatttaaattatatatttctgattcaatatatttaaatgttcctggcttaatatcatatgatgcctttcccatcttatacctccattacttatgcttagctattcttgctttaatagctttcatcaattcttcttgcgttagttctttattttgtaaagctttatatactctttgatctattgtgttatcggtcatgatatgatgaataatagtcgtatggttttgtccttgtctgtataatctagcatttgcttgttggtataattccaaggaccatgtaagtccaaaccaaacaataatgtgcccaccttgttgtaagtttaatccatgtcctgcacttgctggatgtgctataagcaacttaatgtctccactgttccaacgttctttatagtttgaatcctctaatgtggttgcttccttaaacctttgaagtattctttctttatcgtgtttgaagttataaaacaatagtattggttggccttgagactcctctataatttcctctaacttatctaacttcttatcatgtataagtcttacatcttcctcatctgtataaactgcgccgttagatagttgaagtagtttctgacttaatgatgccccattttgagctacaactgttccttcttcttccgattctaaaatatagtttttttctaattcttcatatacttttctttctttttctgataagactactgtttgtttagtatcaactctgtcaggcatatccagataatctttcgctttcatgcttaaacatatatcttctatttgtttatatatcttttcttcagatccgtctcttagctcccacttaaaaatatgttcgctaacttgatgagttggtttaaagtacctttctcgataacgactgaatgaagactcaagtctttcacctctgtctatcaaataaacttgagcccataaatcctgtaaactatttggactaggtgttcctgttaatcctataaatctattaatgagtggtaatttctttttaatagatttaaacctttgactcttaggacttttaaatgtagacagttcatcaatcacaaccatgtcaaatggccattcttttttatattgatcacataaccatttagtattttctttattggttacatagatatcagcctctgtgtttaatgcatcatttctttctttaggtgttcctaaaactaaagacactttcagatgatttaaatggttccacttatcaacttcatcaacccatgtatctttagcaacttgtttaggtgctataactaacatttttttagtgtctaacaactgcaattcactaaatgctgtaagtgttgatactgttttccctagacccatatctaaaaacagaccgtatttctcattatctatcactttatctattgcatacttttgatagctatgtggtttgaagtcaatcgccaaatgttccacctaccattctgataaaagtatttacttgttctttattccataacacatatactttatgatctctattttcaaattgtctatgcacatatttttgtaaaggatgcaactttcctttttcttgcttcatttctacaaaatatgtttttccttctggcataataataattctatctggcacacctcttgttccaggtgcaacccattttaaacataaaccgtttagctttgttatctctttcactaaatatttttctaatgtcgattctttcatatattcaccttgtatacaaaatttatatttgtgttccgatgttgcatcaattcttgccaaacttttaaaaatagctgttagagggttacccctatacctctttactccctaacactactttttaaactttatagtgaatttgatgcaacattggaaacaaacagggttgaaccttacagcgagaagggaaagaggtgttgtatcatttgttgcatcaatgttgcatcaccaaaaatgatacaacacctaagattactttttacaccaccgtgttgcatcactcaaaaaatgatgcaacatttgatacaacatctaaaaatgtatatttattcaatatttcttatattaaatcctctaaactttcatctcttacatacgctatctgtacaccataatcttttccgaatcgaattttcccacttttattaccatcatatacagaccaattgtctaattgtcttaagatgtttgaaatctttctaatttccatagatcctctactatctcccttatctttaccaaaacattcaacaaacacttcaagcgcacagaccttatttctttcaacgtaatctacatttcctgttggtaacatatcaacatcaccttgataaaatcgtcttctttcaaagatgctcaagtcttcccaattgcttgggattggcgtgttaagatattcatcaataatacctgtatatggagattcctcagtatgtttactttggattgaacgcatttcttcttctagttcagggttaaggaacaactcttctccttgttcataatagtatttagcttctgcccagatttggtcgatctcttctttggttagtttagaccagttcacttcaactctctctggatttacagtcattggccaaaaacgtcttccaccagtttcatctcttaagaaatcaactttattagttgtaccaatgaaaatacattgccttggaaaatcttcaatataatgtccataagcaacacgaaaccggtcaacttgtttagatatgaaatgcttaatggcttcaacttcagcttttcttgtagctgcaagttctgccatttccattaaccaaacgccttgtaatgcctcatatgcttccttaccagtaacagaaactaaactgtcagaaaaccatgcaccacctaatttttttagcaaagcagatttacctacaccttgaggaccataaagtgtaagcatatagtcaaatttacatcctggctccattactcgagcgattccagcagtcaatgcctttttggtagttgttctattcacttcagtgtcttcaacacctaagtatttgataaataacttttcaagacgtttatgtccatcccacgatattttatttagataatcccttactggatgataagcattttgcattgctacgcttataatggcatcttttgttttgcctgaatggtgtatgtcataaatcttttcgatataacttcttaaactgctatcatcaccgtcttgccattgacgtattttaaaattattattccatggcattttccctaagcattcaatttgttttgtaaattcattaaatgctatttttccttttaaatttggatcattacgcaatataatttctatatttgggatactagctttgaaagtacctttcgaagtaatttctaacgtctcagaccatgcatcatcgctatttactatttcatcgaaatcctgcattgcatcagacattttgtcgttaattaattgctttttaacaacttcatcattttgcgctctttgctgcattgctttataactaggtagtcgattaaccggagtatctgtattagcgtcatcatcttgagcaccatataagtgtatgcgtactaaatcaaaactgttcacaagcataccgcttacgggatccgtattatgatgagaataggcaaacttgttattttcgtataacaccaatccacctgcagttgaaccttcatgataggtataacggttagtagaatgtttttcgtataaatcaggaataaaagtttctatagcttcttctatcgtataggctctacaaaatgcaccaacaattcccggcttttcttctgggtcgccttgcttatctgctaatcttttagtcttactctcttcccttgaagacgttggccattctaatgtgtcagtccaatcaacatattcatttaatattttatctgggtctaacaaaggtaaatcttcataggtaaagaaaaattccgcatcgttactagttgaaggccaatacattaacctatgtggttgataagttgtatcatcgaagtaatccatgccaacgatatctgcgactttacgcccaatagcttcatactcatctgcatttacatttcgttttaaaggaatcactaaacgcagtcttggacttatctctctatgcttatgtgttgaatataaacaatatgcaaaatcataaaacatagataatatgtcggtcatatcttgagcagcataatcgatatcaagtgttagcattgaacgattcatgacttgaccagcacgccgtttaccttcttttaaataaccgccgacaaatccgccaacatcttttatatctgcttgttcggacttagacattttattgtactcagttaaatcttctttagttctaactgtttgtgctagcttctgcataaagtcagaccaagccatattgtgattagtccaatgtgtggataggcgactagcagcataagaatatgagacatcacgatcatatttaattgtttctatttgagtgactttgtctaacatgttcggctcctttcattattttagatagagcagagaagccaacgcctctctttagcttttgaatctttttctaattcgttcaacttcattttcataatcttctaaaccttcaacaccattattttttactaactgcttgaaaagataagcattcatatactccaatgcttctatggttttcatcttatgagaaatgctacttaacaagatcaataaaaatatagataaaacaattgaaatgacaatccacatatttacaacacctccagtgctattgctaaacacattaatataattaattcaaaaatgataatatctattaccatgaaacttcagctctgattttttcaaagtcactcggcgcctctacatcatcattagccgtcatcataatatatacttgttcagttacatacttacctagctcatacattgctagtaagaataatagtcttagtatttgtttaatcattgtttatctaccttctttgcttcgtataagaccggatataaatttaaaaagtgtattctatatccaatcgtcttaacttctactttgtcgcctacttttaacctagcttgtatgtctgcgctatcaaatttctttttgaataataagtcggagttttcaatgacttgtttgttgtctaatacaatatagaacttgtcttctttatcttgtctcttgttatatttatctgtaattgtcccttgatgtacttctttgttttggtaactagccactgtatagataggcgatatgacaacaagcatcagtgcgattacgccgaataatcgcagtattccagcaataaagatatcgaaccaatccatatttttaagttttttaatcatcattgtcatctcctgtatcaatcaaaaaaagtacctgtctcaacatactctttaactgttgttcatttagactggctaacatagggctgtaaaattcactatcttcatctttaacagttttaataaaacagccttcaatctcagctttttcttctggcgttccatttttatacgtcttaaatacctcggtgtgcttttctggtaatttcattttaggtgtattaaacattattatctcccctctttaatgattttatttcttttcgaacaaagaacctaatacttcttcactaggtctttcgaataaggtcactttagaattattagtgtagtaaacaataggtgtattttgtgactcatatttctctttcgcttcttctttactctctgcctcaacaactgtaaacctttgattactcttagctttagttatgtgtgtatgtttacgtcctgttgaatctttgaatgttgtgactaagtattgtgtcattcctcatagctcccttgaacttgtttgagcttactcataaaaaacattactaaaaatgctattaagatatgcgtcttttgatgtttataagcaaatgtagatatcataaagatagtagcaagcattaacatttcatatatgtttgtgtgtatagtctttttactcttaagaaaaataattgctatgcgataaaagagataaacgccaaaccctattaaaaatatttctaacatgtcgctcacttccccaaaacctccttgactcgatataagatgtctttacacgtatccttttcctgcgtctgctgttccatcttgtctttcgtggttccttttcattttctttttgtatgcgtcaatgagttggtcgatagaatataagttgtaagctatgtctatcgctatcacaattgccaattggtcgggataaaattctttgaatattatctgtggtgtactaacaactgcgccttgagcaaattctttatctttaaaattaaacattttgtgaaattctgtatctttaaaacttgattcaatcgcttcttttatctcttctgatgacactcctacttgattcgcaatactcaatccaaacgccaacatgtcagctaattcatcaagttgtacgtctaacggcttacctggtttcttcttccagttcttgaacgtttccaatgtgttaaaccattcaaagaattcaaccacatacgcaatcttgctatctcgtaaatttagtgttggtattctatcgtcgaactccttttgtatttgtaataactcttgtaactgatcgattgttaatgtgttattcattatcgttgtcctcccattgcattgtgttgccaccaactaaaagtgctacagctctagctttgttaatatcgtcagtaatccatgtgtttaaaatagttgcatcttcttttggggtataactagcccaaaaagttccttgtttagtacctccacttaaatgaacgtcttgcacaaatgagccttttgcataaactacatatttagcacgctccaatttcttgaacatattctctgcatctttattaccatcaaataaatccattgcatatatgaaacttaatatatgctgttctcctataatatttctgttttcgtcatttctatattggatataagtttctaaatagtcttttttaagtttttcccatatatctttatgcttataaacgtcctcaatctcttttagcaatccctctgtatcattcccgttatacgcactagcacttataacggactgttcaatttgttcgcggttattcattagtgtcttcctccatttgatctaaaaattcgtagaactcatttgttccgtctagtttgtccattcggcacaatataacacttaagttgatttcagctcttctatatatagctacttccttgttcgctctgctctcaatctgtagttcgctaagtctaaaacggtaaaattcgtatcttccaaacaattcatttttaagcgtgcgccacatgttctccaactctttgttgcgtttttctagtttatcgatattttcagaaagttttttgttttcttctctatagtaaaacgcctttgttctaaaataatgtattgcactttcttcgccagtaatagagtttactctctctactccatattttttaaagtaacttaacaattcctctctagtaggtcgtgtcattgtatcccctccggaatatttaataatcttctggcataactatatgcgccatcactatttaatccgttaccaaagcatgtatacatgtattcgtaatccttttttgttaaatgtttgccaatataaagttcgaaacctgtttgtaaaaaaacctgtgttctttcaggagacatattttcaatacaagatctgctaacccaatgaataaatttaacaactaaatctaatttgttagcgcaatcttttagtgaaaagaaaatatttgattcgctatcgaggataagctctttattttcattgataaaactgaatttaaagcaattcatcatttcgaacacttcataaatcagattatctatctcatcaaatgcttttgcttttctcttaacttccgctatatccccaataagctcatctcgttgcttcttgtactcatcacgttgttttctcatcttcttcaacctagcgtccattacacctagttggaaccctgtttcatagttcattctgttacctccaataaatgtgatgattcaaatatgttgcctttaacctcacagtcatatctaaggaaggattttatgtctatatactcaaagtaatcattttcggagactgcgccctcaaacataaaatcttttaattgaataccatttacaacatcaatagatattactgctctattaattgttcctattacagattcatcgtctggcatctctaatatttcatcttcaaactcaactatatctcccgcatatatttcgttgttgtttttgtctttaagtcctgtactttgcataagttctacatctttgaaatctcttgcgtgtattaaagcttctgcttccgcgtagttttcatagtgaacttcattctcgatgaagtcgaatcctacaacatcgtgtattcttcctgtatattcgtcccacactcgatatttaggcatcattctactacctccactttttctacttctatgcttgcagttttgaatgggagctttttacgagtcagttttaataccgtattcgtggcttcttcctcattcgtactttgcacaaaataatgcttttttaatttataattacatttagacgctaagaacttgatacaaagacttactttataggtttgcatcattctaccaactccccatctttccagattaacgtcatagttaggtcatcgtttaagatgtagaatgctttggtaggaaaaatattgtcgtcttcaaaacgttcgttcaaactgatacctttgtgtaatgcggatttatagactccttcttgaatctcatatacctctaacaacctatcaaacttagtctcttccgttacttctttttcaatatcaactatgaaggagatatcaattggaataaaacttgacgtcgaacacttatttgtatttggatgaaaacgaacgaatccatcactaaatcctgttgaaaaaaatatttttccttgtgatagatccggattttctcgcgcccatttaattaattcatctaatctcatttcttttttaactttgattttcattgttatatctcctcttgaacagtaaatttatcgttaattgatacatatccagtcacattacataagatgctatcaacatgaaaagtcacaaaacagttgcgctcaacatcatttgaatagaatcttttattacctgataacttggggttatcccaagcccattggataagttcaggtaaattcatttctttttcaattttgattttcattgtttccgcccttttaaaataaagttagttgcttctgttcctcatattccaaatcactttgctttatatatgtttcaagctcttccgctgtatcaaatgtctttttcacaccttgccaacctggtacgatatgtccgtgaaagtaataagtgccgttcactacatggatatgtgccactcgttcgttatcctgatacagatatctcttagatccgaaaaattggtttaagtattctttacatgcgctatcggttttaggcatttatgcttcctgccatttcttaaacatttggttataagtattatcaaaccagtactgatcacgtgaatgtttctgtggtacattaaacaaatgtggcttcttcttacgtagttcagcctctttacgtcgttgcctagacatttcacgctctttgctctctcgctccatgattttggataacacaatttctttatattcagctaagcgcataccataaggtgcatgtaaggcttctaacaacgcccagccacctcgtactctttttgcaaccattcctggagttaaaccgttcttttttatcaattcattttcatgttcggtaaatttatatggtttaccgttaatctttacgatactcatttattccacctctatacatttacttttttaatccaatcctctaatttgtgcgtgttgtgatttctagtaaatagttcacttacattaacacctagagcatctgccaatttatctaatacatttaagttaaccatctcagcttttccgtttttatatccactaatagttgatcttgatacgccagtttcattgtgcaaatcttggacacttacgttatctctagccatgattacccttaaattagttgcgaatacttcgttcaacttcatttattccacctctatatatgcatgtcttattgttatgttgtcatactttagtaattcgtccggattgtcatctaagcgctttgccagcgtatctttttctttatccacatcatcgtaatgctgatattcaacttctgtaggtattcttatatcaatcgttgcgtttatatatgcttgttgttgcattagatcacttcctcaacttctatgttgatatggtccgcatattcatctaaaacaatacaagtgtcaataatttcacctgtttcccaatccctatcatgctttacaacaaaatatcgagagatgttaaacttctcttctaattcctttattgtcataatctatcctcctaatccttcatatagaagggtgatgtaaatccgtcgctattcaaatttaaaccttctgcccattcaaccggcttattcatgatagtttcgatttccttaagtccatttgaacctctaggtatttctacaattacttcatcatggacatgaccaactattttaaaacctgatgcttcaagccttgctatagaaatcgcaagtaaatcccttgcagttgcttgaacaatattctcgactaacttcccaccatacgtttttaactttgaccatttacggttaagatctaagcccataaattcaacaacttgactaccccaactattttcaccaactgaagctttcggataagctaaagctcttccactaggcaattcaatcattagaaaaccttttttcatataaaatctaagtccatgtgtatgatgcgtctttcgggattttacagtattaattgcagcctcttggcaagccttccaaaaattaactatgttaggatttgcgttacgccaactatcaactaaaccttgtaactcgttttcttcaatgcccatttccaatgcacccattgcttttaaagctccagcgccaccttgatagcctaaagctaattcggacacttttcctttttgtctgagagggtcgcctttagttatgctttctaccggtacattaaacatttgagaagccgatgcttcatatatctttccgtgtgtgttgaacacatctaaacgccattgttcttttgcataccatgctatgactcttgcctctattgcagaaaaatcacttactgctagttcattaccttcttcagcagtaaatgtcgtcctaactaattgacttaataagtcttgaggatgaacattgagtaataaatctaaatcgtcaaaacgttgttctttaataagatctcttgctatttctaattcagtatctgaaatataatgctttgttaaattctgaagttgtacacctctacctgcccatcttccagtaccggcaccgtaaaattgaaacagacctcttacccgttcatcactgcacatcatgtcatgcattttgttgtattttttcacactggttttagacatttgcaatctaatttctagcatttttttagcttttcctgttgcttcttttaagtactcctgaaccgttttcttttgtaaattaggtatatctaatccttggtcatcctttaaccaagccaataattgtgtaggactattaggattttctaaacctgttatatgtttagcttgattaagcaattcttctttactctgcttatcgagcacattagctcctaacatcaatgatttagaaagcttaatacctctgtcgtttatatgttggtcaaaaacccaatatgcttgttcaattgcagttactggaaagtctttaattttatgagcaatcgtcatttctacttctacatctcgaatacagtaatctataaattgttgccatttttcaagatcatgttcaggcaagtttcttgttcttcctccattaacttttgttggtttacaaggtatagagaaataacgaattaaatttttacctgctttatctttttggttttgtagtcttaaaacttctccaactttatcaagcgaagcaggtaagccaatacgcattgaattaaccattgtgcaaatccattcttcaggtggcatctgtttattaaaatgtttagcaagacaagttctttcgaaattagcattgaatgcatacttttttacagcaggatcaaaaagagcaattttaaacgtctcaaaatcagcgtggaaaggctcattatctactttagtcatgtcaatcgcactaatcgctccaccatctattgaataagctataattaaaatttcgaaatcttcagcttctgtgtatttataggcaccacatttcgaaatatcattactgctatatgtttcaatatctatattcataaatctcaaattcttgacacctcaatttctttaaaattaaagtggggctaaaaccccacctattgacttataagaaatcctcatcatcagtgtctaattcatcgaaatcatcttctgctgcacttgcaccgccaagagattcgcctttttctacaagttgaatgttgttcaatccaactgcgatacccttattaccatttgtgttgaaaggaaatagattaattgaagctctaatataatcaccacttacaacagttccagaatccgttaatctaattttgttttggtcaataataccaggtgcttgtttgcttgatgcgttaataaaataagcgtcttgataattcacatcatcttctctttcagtatctccatcacgtaatggaagtttcagatttgcaggaactttgcctccaaacttactaacttttccttcttctttagcagcttctatagcttgttcaatggcttttatcgtacttgtatctgatttaggaatgattaaactgattgaatactttgcttcttgcccttcttgcatactgtgaggttcaaaaatatgtgcatatgatgctcttacttttcctgtaatcactttagttttatttaatacttttgctttcatgtttatataccgtcctttttaatttttatagtttgtcaaaatcatcttcagcagattgctttatagctggtcgtttatcagactcggtagcaagtgttaatttaccttgtggcttttctataaagccctctgtaattttagaaaatgcttttttaccaattaatttttctaatttcgtaatgctaagtaacttggtttctgtaatatcttcaggtttataacccgcttcaactaacttttcaagcgttgcttttgtatcagttatcattcttcgcgaacgaccttctacaagcttccaaccaggatagtttttatcattttctttcgcttgatctagcgcataatgttctacttcatcagcccattttttgatatcaggcagtttatataaaagttctgcaatctcttcatcacttaacaaatgtggtggcttttgaggcacattttgcatgtattctgcacgtgttctacatgaatgctttatcttacagaatctacaatgactacctgctttaaactcaccttcaccgttataagcaagtctggctaatggtttaacaaaatcggttccccattgaagtaatcttgatattggtaactcttcagtagaaaagttatctattcgtggttgtatgatagtcatgcgaactgtatgaatgtcatacattaaactaagcagttcatatgcgcccaagccatataatctaagttgaggattatctatagctgaaacttcaatgcctttaccgtatttaaggtcaataatttcaagtacaccacctgaaaatataatgacatcaccagtaccaaaagattcagggacgtatttacctaaatccaattttgtttcaaataaagctattacatcgtcatctctactcaaagcttcgttatatttttcttctacattagctacgtactcttcaacatattcgcgcaactcttcactgtaatattgatttcgcttataattttgaaaagctttattaaactcaaactgtgttaggccttcatatttaagactgaaatataactcacttaactcatgagcgaatgtaccttcttcagcaaaaactgaacttttatctgcaataccttcacttgccttaatactcggtggacagtttagccattgttttgctccacttgcactaagctttgcatgagctctatttgagtgatctagcttcatgcattgattctcgccttcataaaatcaacaattttttcataatactcttctttgatagtagatagcttatccgcgccaagttcgttaagtttatttctaaattctttcttatcagaagtgtctgcttttttaaggaactcttttcctactgataaaacataatctttagtcaaatcagcagaagtttccttaacttcttcaattgattccagttgagctgtttcttcttttggcattggtgcttctttaactttctcttgtacaattgatgaatctacagttgatagttcagtgtttaacacacgtaaattcttatttaatagttttaattcttcaaaaatatcttctaatattgccattgattaactcctccttaaaattggttagctagacgaatcattaacttgatacgttcttctatttctctagggtcatcactttgttcatttaatcttgctaacaattcaaattgttcttctaaaatttcttttttacgttcgactacacttaaatgcaattgcgattcaataacacgccagataccccaactttccatttcaatctttccttttttcttaagttttgaaagagtggattttgcatgtgttttagatatcccaaaagtttcaacaacatcatcagaattgaaattgtcatatgttgcaaaatgtgatagtattttttgttgtaaggtcatattaataactccttatataattatttaaaacaattgctcatcttgcactgttacttgctccaacaagtagcagtttctttattcttcataaaagtattccttataaaatatgaatgttgcgatacttgcgaatcccgcaattgaccatgctgtagtgaagtatagaaacggcataagcacaatcgctaagactgtgaagcacagtactgctaataggtagcttttatatgtgtcgctcatttgataatcctcctaataccattttttatgctttctgatcaaatactcttctaatttagaaatattaatcaatgttcccgttgctgaataatcaatgtataaattttctacacctaaattatcttcacggtaatatttcaaccagttgtatactgtacttctacatactccaaacaattgatggatttgtgtaggtgttgcgtataactttttcacaaatttttcttcgcctcgatatgtgttttctggtgttggtggtattatgatttttggcatctctatcactcctttagataaatgttaaagtttgttattattcgccctgtattgaagttctctatctaatgcatagaaaactttgtttatttctaagtagctgtaatcactttttttaataagctctaatatttccgctcctaagttacgttccttttccgttaaataggatgaagaagcatcagctttgctagaaacttgtgggacgcctatacgcaatccttctgatcttgtgttcatttgtttatgctcctttcgtgtataatgttgttatcaacctaaggaggtgataacatgcccttgatatctgatgaatttgatacacttactaaagaccaacaatatatcttgtccgtactctacaaagattatttagaatgtgtaaagttaggttcggttaaattaacctgcaataattttggaagtgctaaagatatacatacaaagtattttcaaaaactacatttcgaagatgtaaaatacgatttaaataaacttaaaaactctgggttcctaaacggcgtgtatgctagtaacactatttatcatgtaacaatttcagacaagactgttgtttactttgaaaatgagtttaaaaacaatttaaaaagtatcattgatagcatttctaaaattgcttcaataattcctggtctctagttgggtttataacttcccaatcatttgccatgaggtcatcggctgaaggttgccaatatctgataaggtttgtcccatcgctatttgaaatgatgcattgtaaaaaactatcatttgttggtaatatcttagttcgatgactttctttccaatctttccgtgtcatagagacaagattttttgtagctatcttagttgcttcttgaatgttcatttgttattcctccttttaagatgtttgttcgattggggtttaatttgttttaataaaacccgaaattaattgcttctagtagtttagtaatttcaatcaaggtatcttctaaacattcttctcttgtcatatagatttcgtattccctaccgttatgttcaattttctttttgatttgtgatccttcatctgtaccaagagcaaagcttatttcttgttcaacttgtcctaaaacttgttgtactacttttactttttcttcattcatttttaagtcctcctattaagctgttacgttagcttcataaccaaattcagtcatgatttcgtgtatttttaatctgcctttttgcgtccatctagtttgtagcactgtgtcttctctaccgtcagagcgtacaattggtatagtgtctgattctgtgtaactcttgcccatgtgttctgagtaaagcacccactgtttatttacttttcgttgtaatctagcttcgtgtagtagtttgtttaacttttgtgctgaaatcccatagtctgctgcaatctgagttgtagctaatgtgccagttgattttaagatttcatcaacataatctgctttaggcttcaactctcccatttcttgctgtaatagtaagttttgctctttttctttcttatactcagtaagaatgttaatgatgtaatctggattgttcagcgtgtttacttaatgcgtcacgcgtattcgagtatcctaagatttctgccacatctttacctacaaaatatggttcgttatctactgttaatgttcttactggtaattcttcaaaattaaatgtttgtaatgcttgcatttgtttatgcctcctcaagtgtcttttaggacaccaattcttcaaaaaaaatatcgttcatttcttctctggttaaattaagaactttgactatcgtcttaatttctttgatgtcaaattcttgttctcctctaattctactataataagcgcttttagaaagttttaaaccatgattattcaattcttttaaaaaatcatttacatgcatctctttcatcgctaaagcagaataaagtttcgctttgttcatttttcaacacctccgtgtcttttaggatacttcaatgatacatgctaatatcaatctagtcaacacaaaagtgtctaaaaatacatttttatttttacttcctatataggtgttgcttttaagaaactttagtgttatattcagtacatacctattaggaggaaatttaaaatgaaaccagacattaaaagcagacgtaaagaattgaatttaactctagaacaagttggagatttagttggtgtaggtaaatccacagtaagaaaatgggaaactggcgatatcgaaaatatgaagagagataaaatagtaaaattagctaaagcattaagagtatctccatcatatatcatgggtattgaagatgagaaacctcaacttgaaaccataccagttaaaaagataccggttgtatcaaagatatctgcgggaatgcccatatatacagaagagaatttaatcgactacatatactttgctactaaaaatttgaactctaataaagaagagttcggattgcaagtgtctggggatagtatggataaactctttcaagacggagacgttgtagttgttgaaaaggattcgactgttgagaatggccaattaggtgttgtattagtcaatggatacaacggtactgtcaaaagaatacgttacaacaacgaccaaattattttaattcctgaatcaaacaatcctagtcactacccacaagtatatggaaaagatgacgaggttaagattgtaggtagagttgtagcaagtcaaaaactattcaaataaaaggggctgattataatggattttgtagcgatcgatgtcgaaacagctaacgaacaacgcagttctatttgttcaatagcactattaaaatttcaagacaacaaaatgcgtgatgctatttatactcacataaatcctgaaacttatttttcttctataaacacttctatacatggaatatccgaagaagacgtaatggattcccctaaaatgtatcaaatgcatgaagctattattagattcttagataaccatataatagtagcccataatacatctttcgatatgtatgctctatgtgattctttcaaaaaatacaatctacctttacctagcaatcaatatttttgtacttatcgattaagtaaagatttatataatttaccttcatatagactccaagatttagctgaacattttgacattaaaaacgaagaatatcacaatgctttttatgatgctaaagtgtgtgccaaaattgcatataacatattaaaagaccaagatgcaaacttgaacgatttagtcgaaaaccaaaattttaagtacggtgtgtttggtcagaatggattcataaaaaaatcggctaataagaaaatagagctagtatacaatgaagagttaaacgataaaaatcatatattatatggtaaacatgtttgttttaccggagcgttaaaaggtttcacacggaacgaaatagcccaaactgtaactaatattggttctgtttacgattcctctgtaaaaaagtcaactaactacctcgttgtcggtaatttagaaaacctagaaaaaactcataactataccaagtcaagtaagattaaaaaagcagaaaaattatcaagtgaaggacaagacattgaaattttaagtgaaatggatttcttaaaattattaactaccttcacttctgtagaaacgaaaacgtgatgtcggttgataatgttttattgtgaccaacagcgcctatatggcactttaatataaaagacgtctatttcagcagtgtttaaaaggagtttataatgaaaataactaattgcaaaataaaaaaagaaactatagtatatgaagttttaactagtggtaatcaaccattcacttatgagttacctaaagatttatcgtcacataatgcgcgtaaatacttggaatttatttcacaaaaaatagatggagataagttaaccaaagaagattcattatgattttactaatcaaaaaacgcctactagtgtagacgttgaatggtggtgagaattttatggtagataaaaacaaaaaacaagaaactactcgtagtaacccattaaacaaaagttttgaaaagtcaggcgccagccaaaaattaaaaagcactttatcagaaaaagctaagaaaaaagattaatattcattcattaaatataaatccaatttaatttgttgtttaaggtctacaagtgtatgtttaatatacaattcatcgtttgacggtaaatcagatactttgaaatcttgtcgctcaacctctagtaaatcgaaatcgctaccagctgaattataggttttaagttcaccctcttcaatgattctgttttcaaagtctttaataactataaatactggtttaccgttgttattaaacaacttgtctcttttgtctaataagcttatacaatccaaattcataaactttcttgtttcattaattaaccagataatgaatttaacaattaaaggattaaatacaagcactgttaaaacaaaaataattagaaaccaaatatttgcttttagacctgtaagcaactgaagtaaactcaaattttttaaatcaacattattaaaaattataaaagtataaaaccatatcaaacatgtttcaatagaaaaaatcaataatacaggagtattgataatcttgtttttttcactaactaaacctatcattgttagatatttatatggtatgtaacctaaaactcctgtaagaagaagcgcccctagaaattgagtcatcttatcacctactttttattttattataacatatttagtacctagtactaaattttgggtagcccgcctacccttattattttttacaaatttacagaacgtacgttcctacaggaggtataaacatgtggattgaaaaatttaaaaacaaaaataacgaaactaaatacagatattacgagaagtacaaagatccatacacagataaatggaagcgcgtaagtgttgtgttgaacaagaatacaaaacaatctcaaaaagaagcaatgtttcgtttagaagaaaaaataaaagaaaaactgaacaacaagtcgtcaagcgaattaaaaactttgacttttcacgcgctattagatgaatggcttgaatatcatataaaaacatcaggttcaaagttgactactcttaataatataaaaataagaattagaaacattaaacgatacagctctgagaacttgcttttaaacaaactagatacaaaatatatgcagatatttattaataaattatcagatatctattctcaaaatcaagtaacccgtcaactcggagatatgaaaggagctattaaatatgcagttaaattttacaattatccaaatgaatatttgttaactaatgtcaaaattcctaaaagaagaaaaacaatagaggatatcgaaaaagatgaatctaaaatgtacaactatttagaaatgaaccaagtcctacagatacgtgatcatatactaaatgataataagttacacaagcgaaatcgcattttaattgccagcatcttagaagtacaggctttaactggtatgcgcataggagaactacaagcactgcaggaaaaagatatagatttattaaacaaaactatcaatataacaggtacaattcaccgcattaaatacgaggaaggattcggatacaaagacactacaaagactataagttcaaaaagaagtatcagcatcaattctagaaccgtagaaatttttaaaaagataatactggaaaacaaaatgttgaaaagatggaattcgagctatgttgacagagggttcatattcacaacaaaaaaagggaatcctttatgtaataatcaaatcgccggtgtgcttaagaaaactacaaaagctttaaatatgaataagaaagttaccacgcacacatttagacatacacacataactttattagtagaaatgaatgtttctttaaaagcaattatgaaaagggtaggacatgtagatgaaaaaacaaccattcgcatatatactcatgtaactgaaaaaatggatagagaactaactcaaaaactcgaaaacattccaagttagcttaaatctgccctttttttgcccttatattttttacaagctttataaaacgcttgagaacactggcgttaaagcttttcttgaaataaacatatcatcataatgtgatggttcaaatatcatttgtacaatcaaaggcttcatgttcttaacaatatcatctaaatggttatctaaaattggtgacactgcttttaaatcattaagaaaaggctcccatttgcctaaagtattatctaattcttctaatttagttttaatataattacaagttacattaggaatcagggacaaaaattctttcttttttacatttaacatttcaattgcatgtcttaaattcttacgtattttgggaattgtattaatcaaatattttattacatcgacaattttcgatgcatattcatcatatataccttgaacatagtctgctatttttttaataccatcatcgatatggtcttttaatattttcatttttcttcctaaataattagaaggtataactagaccctgtaccatattttcgccgctacaattaatttgaaaatttccatctaaaattgttgcatcttgttgtttcataatacttctaatatctgcaatttgcctaccataaatatcattttgattttttatttggtctatattctgtttcactactttcaaatgtttcatcatttcttcagatactccatctctgaagtcgtgatctatatttttgaaaatttctaaaatttcattatctatactatcatacactttttctataaaagattttatacctttaaacaactcattaattctttcttttaatgcatccaatgcaaaatcaggtaataagtgtttaacagcactaatactttctattgtttcatctgcaacttcttcaagtgagtttattttactaattaaagttctttccatttcttctaactgaaataagttaatcttatccttaaatccttctgataattgtttctttctatctgcaaaatttttattttcattttctgagatgttaaaactttcatttaaaaagattacgcattctgctaacataccacttgtttcaccagtaatcagtttactcaacgcatcaagattttctaaattaagtttaattaaagttcctcttccagaacgtgcaatcgaatctcctgtccaaacatttattggaattcgcccatccatatctaatgttatgttaatagtcttttttactttttttccatttttaatttctgtatcttttaccgactttattttgattagtggtacagtatcgtatgtgttatcttttctatttaacttccttttataacctacatggctgtctattaaagtatctaacctgggcacaccatcattaatgttaacgcgttttcctggcatatctttgatgaatggatcttgtaaccatgttaataaatcgttggtactattaaaactaatcatattatcaaagcgtggtctagcaaatttctgccaagcagcataaggaatcattgctgagtcagtagcaacaactttttcattcggatgtttcgctccttgatattttgctcctgcaccgccttccgaattaccgccatccgccacaatggttttgtttttgaagttacttgattccattctatatttttttaaaaaatcactatttgataatctatctgcatcttctaactttattttatattgatttgataattgatctgtttgctttaaataatctgtgctttcattatcattattcattaatttagcattttggagccaatcatctccaaaccccgatgattttaatggattatttggattaattgcctcattagatgttccttgataaattattgtctgttgaccagttggtttacttttatcatctaataactcatatattttaatatcagcagcaccattcaaattactattcttatcatcattataactgtctacttgtttaaacctttttccattaactttaaattctttttttatatcaatattttgataaacccagtaactacttaattctgttaaatccctatcattaattttattcatctttactgtgcaccccatattctattggacgattatcatcataaaaggctttcttagtattaatagtgggtttccctatttgtattgtgattgtagatttatctggtttattttttaaattatataatttatcacttagttcgattacatcatctactgtattgtctttagtaaagtttttcttagtagaaaaaagtgtagcaacagcatctgtatttgcagcgtaattcacttcttttcttgctcgttccattccttctttaaattctttatcattttttcgaatcagtggttcataatactttcgatattcttttaaacttctagaagagtatgtaatataaaaatattcatttttatatccgacattttgtgtcttgttaattgcctcttttgtaaagcctgtatattgatatttcttttcattttctttgaagaatttatataagttatcatacttttctttttgcgctcgatattcaaagccactcagcactgtacccaccatcatactcatatcatcaccattgtcattactgcgcattgatcctttttgatggatggcatctttgtacaaaggtagacttgcattaaatacaatgccatgatcttcacaatgcacataaacttctacaccatcatctttacctacaacatttgtagctttaacttttagtccaaagttatctttaaagaattgttcacctactttttcaaattctttacgatgcttcttcgcaaattcaatcgcatttttttctgcaggcggttgaaagccttggcctacatattttgaagcttccatttcttctggtacagattttgtttctgtttttgtgtctttttttgattcattttccatcgtggaacatccccctaaaattaatgtcgtagctaaaactgatccaatgaattttttcatatgacacctcgaataatttaattaatacaatatatctatattttaccctatttttataatcaaataaataactttatcaaactttatatttttgtataaattagtaatatatttaatagttgatattcgcaaaaaccctaagttctaatccacatacaaaattccccacatcaatcaaaaaacgcatgctataaattagagtctctaatcaataacatgcgttctgaaataactatattcaattttattctggttttggtagtttaataataaatgttgtgcctttccctaattcgcttttaacatctatggaaccaccatgctcttcgataatcattttacaaatgaacaaacctaaaccggtaccttgtttacctcgcgttctcgctgcatcaactttataaaaacgatcaaatacttgttgtaaatgttctggtgcaatgcctgtacctgtatctttaatgtataaaatatcttcgctttcattttcatcacaagtaattgcaatttcatctccaggtttcgtataacgtgatgcattatcaattaagttcgttagtacttggtccatgcgatccatatcataactccaaacacgcttcttacaataattaaaagtcatatttagacctaaatcatcagcttgttggcgatacttaattttcatcttatctagtaacgctgcaataggctgaacttctttatttacggataacccttcagcatccatgcgtgcgacatttaacaattcattaactaaacgatttaaacgtttcgattcatcaaggacaatggcaagcgattcttttatttcatccggttctgtaacaataccatctacaattgattcagtataaccttgaagtaatgatatcggtgtacgtaattcatgtgatacattagcaatgaaatctttcttcatttgatctagattgtgctcattagtcatatcacgaactgtcacaacaacaccacttttacctccctgttcaatcttgtcgatatagcttgtggtcacaacaaagaatcgtgcattcatttctaaatcgcgcatttcagtttgttttgatttaaaagtatcttctatttgtcttaataagaaagctttagcatcttcatcaatattgtccataatatcattcgccatcttattagataagataatttgtcgactctcattaatacctaggacaccttctaccatagagttaattaagctgtctctaatatttttagatgtggataatgcgtcgacatgctcttcgatttctgtactcatctgattaaatgcctgcgataattgaccaatttcatctttcgttgtgacagaaggtttataagagtaatccccttcagatacacgtgtagcttggtctcttaaacgtcttaaaggttttgtaattcttgacgataagaaaaacgcaaagactgttgtaattgttaagaaaataacagccgtaattatggtgataatcgtaatagcattatttgtatcttcgattgatttcaagtctttatatataaagactccactatatttgctatgactattcttctgtgcttttgttggatagcctaacaaaatatatgtttgagatgagcccttttctttaatcgttacatttcgagtaacagatttacctttatcaaacacatcgtcaaaatggtcgttgttgactacttcattcaacatttgctttttaatattagaaagtgaagccgttgattgacgatgtttattatttataatcatcaacccaccaggattttcaattaatgtttgactatattttattgcttcttctttattatgtgattgttcgaccagtgaacttatacgtctagcatcttctcttatggcattttcggtttcttgtgtgaaatagtattgcataaaggtaattaaagcaatacttaataaaattaaaactgtcgtcactattaaaataatagttaaccacagtttaattacgacactatttagccggctcatcattagatttaacctcaaatttatacccaacgccccagactgtttgaatcatatgcgcagcttcactagacacacgatttaacttttctctaagtcgtttaacatgagtatcaactgttcttaaatcaccatagaattcataatgccaaacttcttttaataattgttcacggtcaaatactttatttggtgttttagctaaatatattaataattcgtactctttaggagtcaaattaacttcttgattatcagcaagtacgcgatgtgcatcattatctatttctaaatgtttaaattcaatcacatcacgtgcgtgaggttcgctttgttctacagttgtagattgcgttcttcttagaagtgctttaactcttaagactacttctcttggtgaaaatggtttgacgatataatcatctgcaccagattcaaaaccttcaacacggtttgtttcttcacctttagcagtcaacataataatcggtgtttgtttatgttcacgcaatttagttgccacctggataccatccatttcaggcaacattaaatctagtagtatgcaagcataattattctccattgcaagttcataagcctcttggccattacttgcttcatggatttcaaaagattctctttctaaatacattttaagtaatcttctgattctatcctcatcatctacgataagtatttcgttcgacatacaggtcatacctcccacacatgcttttctttacaaaagtattatatcacaggaaagcgcatacagttattaaaaacctaaaattttgtgaaaaaattctcaaactttgtgataaatacatattttatttaattatttcccatgttctgctaaatgacgcatcacttttacttcatgaggcgtcaatacacgtccttcaccagcattcaaaccgacaacatttaaaggcccatattcaatacgagacagtttcgtcacttgatgaccaaaatgttcgaacattcttctgacttggcgattacgaccttctgtaattgtaatttcaaccaatgttgtgtttttatctttatcttgtttcttaactttcacttcagccggttgcgtcataccatcttctaattcaatacctttttctagcgctttcacttcttctctcattaaataaccttttaatttcgcaacatattttttcttaatttgatatcttggatgtgtcattaaattagtaaattcaccatcatttgtgagtaataacaatccggaagtatcatagtctaaacgaccaacaggataaatacgtgcttctatatctttaaagtaatctgtaaccactgtacgtcctctatcatcagatacacttgttatcacttgagttggtttatggaataaaatgtaaattttgtcttctagttctattttaataccttcaacttcaatcgtatctgatggcttcacttttgttcctaattcagtgacagtcgtaccattcactttcacttttccttcagaaattaaagtttctgccttacgtcttgaagtataaccgctattagctatacgtttttgtaatcgttctaattctttagtcattattttctcctttttgattgactagattactgaaaaaagcatccatttcttcatcgtcttcttcagttgtcggcaaatcttctatattggaaataccaaatacatttaaaaataaatcagtagtaattaactgttggctacgctgttcattaaccactttagcctcaactagtcctttggcaatcaatgtcttaactgcaccatctgaattgatactacgaattaattcaatatcacttcttgataatggctggttataagcaataattgatagtacttccattgctgcttgtgataatttcatttgtgacttttgttcaattaattgttcaatatacgttgccgcttcttttttagtcgttaaaacatacgtcattccaaatcgttgtatcattaatccatgtgatgaataattttcaattaattcaacgagttggtctttcgacatatctaatatttctaatagttgtttttcatctaaaccttcatcgccagctgtaaataaaagcgactctaatataccatgattatccaaaatggtagttcactcctctaataatgttaatatcttcaaaattacgttgctgctcaatattaattattcctgcttttgacatctctaaaatagctaaaaagtgagtgactacttgttcaattggctcagaaaacgtaaacagactaaagaagttaaaatgatctttatctttcaatctcgatgtcacttgttctgtagcttgttgaatggtaaatgtctcttttcggatttcaacagatttaggtgtatttaactcaactctatttttaactctttgataagctacaattaattcagttaaatcaatcgtatgatttggatcccaagattcatctgtttccaaatgagataaatctgtcggtctttttgtaaaataaaaatctctttcttctttcatgtcatttaaaatagcagtatattctttataattttgatattctattaaacgcccaactaaatcttcccgtgggtcatcatcaacatccatatctgatgttgattgtggtaatagcatcttacttttaatcattaagagttctgacgctaatactaggtattcacttgcaatattaatttcaagctgtttcattgcatgaacgtactgcatatactgctctgttaatgcttgcataggaatatcataaatatctatttcaaatttttggataagatgcagcaataaatctaatggtccattgaaagcatctaatttaacttcatacataatatctacctcgtattgcgtcatatgtgcataattctctaaaatattatagcatgaaaataacttacttttaaattggggtgataacaaaatgcaacaggcactgataaatttctattatcaatttcatactaagcaacattatttcctatgtcatgacattttagaagatgcatggaaagctgaaaataactacagtaagcaagatgcagttgttagtttaatcttgtttgcaactgcttgttaccattatcgccgcaataatttaaaaggcgcctataagtcttttaataaatctaaagaaataatacaaaatgctaaagatagagatgcgttataccttaatttaaatgattatcagttgttaattgagcaacagattgcaaaattgaatgcagcaaagcctttttcatctgttatattaccaataactccagtctttgaacgcatcatcaaggccaactatccagactatgattataatcaggaaacagcaacagatccttttattgtagaccatcacatgcgccgtgatcgttcagaagtgattgcagcaaaagaagaagcgattcaattaagaaaacatagacgtaattaatcaaccaatttaaaaaagccacaatagcacagacatttttagtcatgtgtattgtgacttttgagttattgttcactttatgctctaggatgaaattggttatacatttttctaatttgagatttcgaaacatgtgtatagagttgggtagtagatatgtcagagtgacctaacatctcttgcactgctcttaaatctgcgccattttccaataaatgtgtcgcaaaagagtggcgtaacgtatgtggcgttaacgtctttttaatgtttgcctttacaccattttgtttaatcattttccatattgcttgtcgtgataaaggtttaccatgcatatttaaaaataagacttcagtaacagtcttttttaaaagttgcggtctaatcgtttcaatataagtagttaagtactcaatgactgcgtcgcctaatggtacaattctttctttatcgcctttaccaaatacgcgtacaaatcccattattaagttcatgttttctaactctaaatgtatcaattcagatacacgcattcccgttgcgtacagaagttctaacatcgtacgatcacgatatccattaattttatttaaatctggcgtttctaataaagccaacacttcgtcaacatttaaaacgtcaggcaattttttgtcatattttggtgaatctaataataccgttggatctttcgccgcatatttttctcttatagcaaattgatgaaaactacggattgttgaaataaatcgcgcaatagatttagcagattgcccttggtctattaaatgccccaaacactcttgaattaattgtcgatctataaaatcaatatgcgagatatgatgttcagtcatataatcttgatactttttcaaatcacgtctataagcaccaattgtgttagaacttagtcctttttcaatttgtataaaacgcaaatattcttcaataattgtttccataaccacacctctaaaaaaagcgaaggttaatttaacctacgcaatttactatcctttacctttagcttggcacgtttcacacacaccatggaaagttaaacgatgatctaaaattttaaaattgaactcattttcaactcgattttcaacttctggtaacaaatcttcatcgatttcatctacacgaccacattccatacatactaaatgatggtggaaatgttttgcgccttcttttcttaaatcaaaacgagcgacgccatcaccaaagttaattttgtcgacaacttttagttcagctaacaactctaacgttctgtatactgtcgccaagccaatttcaggcgctttatcttttactttcagatatacgtcttcagcacttagatgatctttttcattttcaattagaactctaacagtagcttcgcgttgtggcgttagcttatatgatgattgttgtaattgttgcttaacgcgatttaatcgttcttccaacgatgtccactcccctactaataattaaaatcattacaaattatttcaaacttcacaattaaaactaacagttttctcaataaaatgcaagcttttctcatttgttatttagaatgattataatttaataataggtgttgcaatgcaatgatagtcttcgcatcttctatttctttattcattagcatcgatttaacattctcaatcggaactttaatgacttcgacaaattcatcttcatctaagtgaactgtaccttcttctaaattatccgtaaaatatattgataattgttcatcgcaaaaacctggtgaaccatacatatctacaacatgtgttaactctttggcaatatatcctgtttcttcttctaattcacgttttgccgcttcgactctatcttcatcatcttctaatttaccagctggaatttctagcaatggtttttctactggtttacgatactgtttcactaatacgacttcttttttaggtgtcactgcacaaacagcaactgcaccattatgataaactaattctcttgttgacgtttcaccgtttggtaatgtcactgtatgaatttctacatctacaattttgccattataaataactgttcgatcaattgttttttcatttaaatccattataatcacgttcctttaaattcatattatatattgatacactatgcttgttagctaaagtgtatcgaaaggagaacagacatgcaaaaaaatatattaaaaagtggtatttcattatctgaattaggtctaggttgcatgagtttaggtacagatttaaaaaaagccgaacaaattatagattgtgctgttgaaaatggtatcacttattttgatacagcagatatgtacgataaaggtataaatgaatcagttgttggtaaggcacttcttaaatatcaacaacgcgatgatatttttattggtacaaaagtaggcaatcgtttaacaaaagatggcagtacaacatgggatccgagtaaatcctatattaaagaggcagttaaaggttcactaaagcgtttaggtatcgatcatatcgatttatatcaacttcatggcggaaccattgatgacccattagacgaaacaataagcgcatttgatgaattgaaacaagaaggaattatacgtgcttacggtatttcttctattcgcccaaatgtaattgattattatttaaaacatagtcaaatcgaaacgataatgtctcaattcaatttgattgataatcgtccagaatcattattagatgcaattcacaacaatgatgttaaagtattggcaagaggacctgtgtctaaaggattattaacttcaaacagtgttaatgtgctcgacaataaatttaaagatggtatttttgattattctcatgatgaattgggtgaaacaatagcctctattaaagaaattgaaagtaatttatctgcattgacatttagttatttaacatcacatgacgtgcttggttccatcattgtaggtgcaagtagcgtcgaccaattaaaagaaaatattgaaaactatcatactaaagttagtttagatcagattaaaacagcaagagctcgtgtaaaggatttggaatataccaatcatttagtgtagaagtcattttcagtaataaaaacagcagcatgaggcgtttcattataaaaatgccttactgctgttgtttatgtacaattcgctataatttatgattatgattactcacttatgatagaaattaaagcgttgtcctcacgcatcagtatttagtaatttcgccttgcggcattgccttaagcaaacttctgccacttcatctcttaataattttattaaaacatctttctatatttcacttcgcatgttgattcatcattattagttattatttgtacacccagcacatttccttgcaacacaagtagtttgaatttttcacaagtataatataatgtaccgtctgaaatttggtctacagaaatatcgcctaaaatatccagcactgtaaattcttcaaatactgatagttgttccgcatatcgtacacaaagtcttaccacactctccgattgacagttcattgccatcccacctatttatgctttatttttaaataatttagggaaacatcgttcaaaaaatctaggcgcaatttgatacattttcaacgcatgatgcatccatttaggccgattaatttccaattgttttgttttaatgccataaatgatatcttctgcaagctgattagcatcaagcataatttcccccatctttttagcatacttcattgatgggtcggctttttgatgaaaaggtgtatcaatcgggccaacattaactgtcatgatatgtaagtttggtgactctagtcttaaagcattcattaatgcataaaaccctgctttcgatgccccataatgtgcagcatttgcttgtgtggaaaatgcagcttgacttgaaatacctacaatatgtgcgttagatgttaaatatggtctcaacacagtatataaaacattaaaactaattaaattaagctgatacgtttcaatcatttctgaaaaactatggtctgaaatagatttgaaataacctaaacctgcactataaatgaatccatcgaatgatgtattgtcttcaaattgcagtgcctgtatcgacttcaaatcatttaagtcacaaggaataacatttatagttttccccaattcctgttcaaagattctagttgctttatcaacatcacgcaccaacaacgttacatgcactttattttctagtaactttcggacaatcgataaacctaaaccactcgtaccaccagtcactataaaatgttgtcctttcatcaattaaccttccttttcaattatatagaatgcaatttatcaactttacataattgagacaagttgattatctttcctaatatatatacaataataagaaaatataacatacaaatcaaaaactaaagggatgtgacgttaatgaaactcgtattttatggagctggtaatatggcacaagctatatttacaggaattattaactcaagcaacttagatgccaatgatatatatttaacaaataaatctaatgaacaagctttaaaagcattcgctgaaaaactaggtgttaactatagttatgatgatgcgacattattaaaagatgcagattatgtatttttaggtaccaaaccacatgattttgatgctctagcaacacgcatcaaaccacatattacaaaagacaattgcttcatttcaattaaggcaggtattccgattgattatattaaacaacaattagaatgccaaaatccagttgctagaattatgccaaacacaaatgcgcaagttggacactctgttactggcattagtttttcaaacaactttgaccctaaatctaaagatgaaattaacgatttagttaaagcatttggttctgtaattgaagtatcagaagatcatttacatcaagtaacagctatcaccggaagcggcccagcatttttatatcatgtattcgagcaatatgttaaagctggtacgaaacttggtctagaaaaagaacaagttgaagaatctatacgcaaccttattataggtacaagtaagatgattgaacgttcagatttgagcatggctcaattaagaaaaaatattacctctaaaggtggtacgacacaagctggccttgatacattgtcacaatatgatttagtatctattttcgaagattgtctaaacgctgccgtcgaccgtagtattgaactttctaatatagaagaccaataaaaacaaacccgccaacacatgtatgcatcatcgcaagcactgtgtttgacgggttatttttataatttattgttatttggcaagcattgtttattactttgtcattagattttaaaactatcaaaatcttttacaaaattaaaattaggtgtatcttcattttgtatcaatgtttgataaatttcatttatatcttctgtattatagcgattgctcaaatgtgtaatcaacgtacgtttaacattggcttcttttatcaatgcaaatacgtcttcaatatggctatgatgataattgttggctaaatgcttttcaccatctatataggtcgcttcatgtaccatcacatcagcatctctagaaatcacacgttcattagaacatggttttgtatcaccaaaaattgctacaactggaccccgtttggactcacctctaaaatcttttgattgataaacttgaccattatgttcaaatgtatcatgagattttacttcttgatatttaggacctggttcaagaccaatgttttttaacgcttcaacattgattgtacctgtagtttcaggtgccattactctatatccatatgatggaataccatgattaagtaaatgcgcctctacagtaaaaccatcatgatgatatgtcagatgatcatcgatttcaatatatgtaattggatagtttaaatgtgactctgataaattcatagacatttccacatatgctttaattccttttggtccaaccaatgtaagcggcttctgttcaccgccctgaaaagaacgactagaaagtaatcctggcaaaccaaaaatatgatcgccatgcatatgagtaataaatatatgtgtcacttttcctaatttaattgcatgatgtaaaatttggtgctgtgtaccttcaccaacgtcgaaaagccatatggaattggaatatggttctaaatttaaggcgattgcttgtgtatttctctcttttgtaggcaaacctgcactcgttccaaaaaatgtaacttccatatatgcccctccttttcttcaattcattttatcataaaatttgtatcaatttagttttaatttatacttgaatcaaaatctgttaaaaattcgtctttgctagttaatttttctaactttaacgtagacataactatataaattttgataattacgttatacttatcattaataagtatcacattaaacatgatacatgaatcgatatttcatttaagacactgcatacagtcgagcatattgtatgacctactgaatggattatcttataataataaatcatatatctaattaagaattgaggttttaatcttgagtactaaaaacaaacacatcccatgtttaatcacaatctttggtgcaactggtgacttaagccatcgtaagttgtttccatcaatattccatctctaccaacaagacaatttagatgaacatattgccatcatcggtattggacgtcgtgacattactaatgatgatttccgtaatcaagtaaaatcatcaattcaaaagcacgtaaaagatacaaacaaaattgacgcgtttatggaacatgtcttctatcatagacatgatgttagtaatgaagaaagctatcaagaattactagattttagtaatgaattagatagccaatttgaattaaaaggtaatcgactattctatttagcaatggcaccacaattctttggcgttatttctgattatctaaaatcttctggtcttactgatacaaaaggatttaaacgccttgttatcgaaaaaccattcggtagtgatttaaaatcagccgaagcattaaacaatcaaattcgtaaatcatttaaagaagaagaaatttatcgtattgaccactatttaggaaaagacatggttcaaaatatcgaggtattacgttttgcgaatgcgatgtttgaaccattatggaataacaaatatatttcaaacatccaagttacatcttctgaaatactaggtgttgaagatcgtggtggttattatgaatcaagtggcgcgctaaaagatatggtgcaaaaccacatgttacaaatggttgcattattagctatggaagcacctattagtttaaatagtgaagatatccgtgctgagaaagtaaaagtacttaaatcactgcgtcatttccaatctgaagatgttaaaaagaactttgttcgtggtcaatatggcgaaggctatatcgatggtaaacaagttaaagcataccgtgatgaagatcgcgttgcagatgactctaacacacctacctttgtttcaggtaaattaacaattgataactttagatgggctggtgtaccattctatattcgtactggtaaacgtatgaaatctaaaacaattcaagttgtcgttgaatttaaagaagtaccaatgaacttatactatgaaactgataaactgttagattcaaacctattagtaatcaatatccaacctaatgaaggtgtatctttacatctaaatgctaagaaaaatacacaaggtatcgaaacagaacctgtccaattgtcttactcaatgagcgctcaagataaaatgaatactgtagatgcatatgaaaatctattatttgattgtcttaaaggtgatgccactaacttcacgcactgggaagaattaaaatcaacatggaaatttgttgatgcaattcaagatgaatggaatatggttgatccagaattccctaactatgaatcaggtactaatggtccattagaaagtgatttactacttgctcgtgatggtaaccattggtgggacgatattcaataattgaattaaaacgcacatgttaaacaaaaataaatgagcgaatgacaaggattgattacgaatcaagtaaatcaattgttctatcattcgctttttttctagactatattatgaaattatattttacaatgcccaaaactattttaataatcattgaacaaatgggtgtataatttatagaaataatgtagaataaaaataaatgattgaattaattggagtgaaagttttggacgttatcaagcaaatacaacaggcaattgtttatattgaagatcgtttattagagcctttcaatttgcaagaattaagtgattacgttggtctttcgccataccatcttgatcaatcatttaaaatgattgtcggcttatctccagaagcttatgcacgcgcgcgtaaaatgacactcgctgcaaatgatgtgattaatggtgctacacgacttgtagatatcgctaaaaaatatcactatgcaaattcaaatgattttgcaaatgattttagtgattttcacggcgtatcacctattcaagcctctactaaaaaagatgaattacaaattcaagagcgattatatatcaaattatcaactactgagagagcaccttatccatacagattagaagagacagatgatatttcattggttggatatgcacgatttatagacactaagtatttgtcacatccttttaatgttccggattttttagaagacttgctcattgatggtaaaattaaagagttacgacgatataatgacgttagtccatttgaactatttgttattagttgtcctcttgaaaatggtttagaaatatttgtaggtgtaccaagtgaacgttatcctgcacacttagaaagtcgatttttacctggcaaacattgtgcgaaattcaatttacaaggtgaaattgattatgcaactaatgaagcttggtactatattgaatcaagtttgcagttaacattgccatatgaacgaaatgatttatatgttgaagtgtaccctctcgatatttcatttaatgacccattcactaaaattcagctttggattcctgttaaacagagtccttatgacgaagattaaataataaaaaacaaagaagccccctaatatatctataggtctacaaatggccttagattctattagggggcatattaatatgttaatttagttcgataacacatgcttcatatggacgtaactgttttaaattaactttggcatcataattaaatagctttacttctccatggcttaaatcaaatggtacagttaattctgcttcgtggttagtaagattacctacaataagaacttgcttttcatttaatgttctcgtgtacgcaaaaacttgtgaattttcagcatctactaaatcaaattgaccatatacgtatacatcattagactttcttaattgaattaaatctttataaaattgtaatactgaatgctcatcttctaattgttgtgcaacattgatagttttataattcggattcactgggaaccacggttcaccatttgtaaatcctccatttaacgtatcatcccattgcattggtgtgcgagaattatctcggttctcatctttatatttcgcaagtaaagcgtctacatctccaccttgagctttcactatttgatagtcatttttaacagcaacatcgttaaacgtttcaatactttcaaatggataattcgtcataccaatttcttgaccttgataaatgaatggcgtaccttgttgcaagaaataaacagctgcatgacttgttgctgattcataccaatacttgtcatcgtcaccccacgtcgatacacgtcgtggttggtcgtgattttcaataaacaacgcattccaacctttattttcaagttgtttttgccatctatttaatacagatttatacgaatttacatcaaagtgagaatcaccactattccacagtcccaaatgttcaaattggaatatcatattaaatttaccattttcttccccgacccagtcatcagcatcatcagggcttacaccattcgcttcaccaacagtcataatgtcatacttacttaatgagcgatctttcatctcttgtaaccaagtttgtatacctggctgattcatatctacatcaaatgctggggcatatgttttaccctcaggtacaggtaagtcacccgcttcaaacgtcttcttaatatgcgtaattgcatctactctaaatccatcaatgcctttatcaaaccaccagttcatcatttcaaatacagcatctctaacttccggattaccccaattcaaatcaggttgttttttactgaataaatggaaataatattgctcagtattagcatcatattcccatgtagatccattaaatatactttcccagttgttaggttcagagccatctggctttggatcttgccaaatgtaccaatcacgtttgggattgtctttactagatttggattctataaaccaaggatgttcatcagatgtatgatttacaactaaatctaaaataagcttcatgcctctatcatgaacaccttttaataaacgatcaaagtcttccatcgttccaaattcatccataatctcttggtagtcactaatatcataaccattgtcatcattaggtgatttaaacattggactgagccaaatgacatcgataccgaaatcttttaagtagtccaatttatcaatcattccaggtaaatccccaataccatcgtgattactatcattaaaacttcttggatatacttgatatgctactgcttctttccaccattgcttattcattttaaaactcctttgctatcgctgtgttgattttcttatttttaattctgtatctataatgacgagttcaataacatcctgtgctttgtttttcaatatatttaaaattgctgcaccagcctgttgacctaacattcgaggcttgatgtcaatacaggtttgtggtggtgacgcaatttcggttaaataagaatcattgaacgttgctgtcattacatctttcggaatttcaatattaagttcatataggacacttaaaatcgctaaatgtaacatagcatctaacgaaatgattgcctgtttaatatttgggtccttcaaacgcgtatgtagattttgcatgtaattaaaaataacttctctttcattactagtctcaataatttgataattaattttattttgagaagctatcgtttcaaatccttgaattctatcttttgaaacttcaaaatttcctttttctgtaataaatattaattcatctacaccttgttcaataacatgtcgtgtcaaattttcagaagctaatatattatcattatctatatgtgtaaattgatgatctatatccgatgtaggcttaccaatcacaataaatggcatgctttcatcaattaacatttgtttaatcggatcattttcttttgaatagagcagtataaacgcatcaaccattcgttgtttaatcattttataaacttcatccattaaatcattcatattatttgagactgtcgtttgtgtaccatagccatgctggttacacgtttcagaaattcctagcaatacattgatgtagaatggattcagtcgaataggctcctcagacccttttaacactaaaccaattttatatgtttggtttgtaattaaagttctagcagcggtattaggaaaataattcaattcttccataactttcttcacttttgaaattgtcgcttcgctaatacgttgatttccttttataactcttgaaactgtcgaaggagaaacaccggcttttagtgcaacatctttaatcgtaaccatttaatcacctcctgttaatttctgcattggaaaacgcttccaaccactgtataataccagtttagtcacactttctaaaaaagtcaaaagatttgtgcaaacgattgcataaaacgataaaaataaaaccttcatactgaaattcaatccgaaaatcaatataaaggtttgtataaatattaaaatcgattgtttagtcactaactgcaaaatagttaccttggccatcttgaaaattaaatacacgttgaccattcatttctactatatcatgcccagttaaacctaaatcatttaattttgagtataatgcatcaaagtttttctctttaaacattaaagatggtgttcctaggttcacttccgggctatgcttttcaataaattcttttgccataatcgtcaatgacgtttcagcatctttggtaggtgatacttcaactgcaacatagtcctcagctaacggtgtttcacttacaacaacaaattctaaagtttctgtccaaaatgctttcgctttttcgacatcatcaacatataacataacttgatttaacttttccataaaatagtacctctatttctctatagtacatgctatcataacacagtaaatattttattacttcacaaaatgcttaaaaatatggcgggatgcttttaaggtcaaggataatacttgtgtaattttttataggttgtagctactctatcacactctcttttatatttatcaaaagatataaaaaaggatagtatctttcaactatcctttaatcaatattattcttcaatccattgtgtatggaatacgccttctttatcttttctttcgtacgtatgagcaccgaagtagtcacgttgtgcttgaattaagtttgcaggtaaatcagcagcacggtaactatcatagtaattaatacttgatgagaaaccaggtgttggtacaccattttgaacaccagttgcgacaacatcacgtaacgcatcttgatattcagtaacgatgtttttaaagtaaggatctagcaataagttttgtaatcctggattattatcgtaagcatctttgatcttttgtaagaattgtgcacggataatgcaaccttctctccaaatcatagctaaatcaccaagttttaaattccattcattatcttcacttgctttacgcatttgcgcgaaaccttgtgcataagaacaaattttactcatatataatgctttacgaattttttctaaaaagtctttcttgtcaccatcaaatgatgcttttggaccatttaattctttagaagcatttacgcgctcttctttgattgaagagataaaacgtgcaaatacagattcagtaatgattgttaatggaatacctaattctaatgcgttaattgaagtccattttcctgtacctttttgacctgcagtatcaagaattttttcaactaatgcttctttattttcatctaatttcatgaaaatatcaccagtgatttcaattaaataactttctaattcaccagcattccagtctttgaacgtttgagcaatgtcttcatgagacatgcctaataattctttcatcatagcataactttctgcaattaattgcatgtcagcatattcgataccattgtgtaccattttcacatagtgtccagcaccattaggtccaatataagtaacacatgaagcaccgtcttttgcctttgcagcaattgcatcaagaatatctgcaactttgttataagcttcttcttgtccacccggcattaatgacggaccagttaacgctccaatttcaccaccagaaacgcccataccaataaagttgattgcactttgtgctaatgctttattacgtctgatagtatcttgatagtttgtattaccaccatcaattaaaatatctccatcatctaataaaggtaacaaactatcaatcgttgcgtccgtagctttacctgcttgaaccattaataaaattttacgtggtttttctaaagaattaacaaattcttccaatgaatacgttggatgaatatttttcccttttgattcttcaaccattaaatcagttttttcacttgagcggttaaatacagatacactatatccgcgtgattcaatattccaagctaggtttttacccataacggctaaaccaataactccaatttgttgtgtcatattacttacctcacttgttgatttttcattagtattgtatcacaaaatagacatacactacactaaatcatttcgaatgtcgcgcaactattttgattatttctaacacttgacttgcaagcaagttcaatgatttaatcggcattctctcatttgttgtatggattttttcataacccactcctaaaatgactgaaggaataccaaatgtattaataatactgccgtctgaaccgccaccagaaataattgtatttgcagataatcctaaattacgagcactttcttgtgcaattttaacaaccgcttcattatcattaattttaaatcctggataactttgctccactgtaactactgctttcccacctaattctgatgcagtagtttcaaacacatcagtcatatgtttgacttgtgtttttattctttctggatcgtgagaacgtgcctctgcttctaaaatgacttcatctgcaacaatattcgtagctgaaccgccatgaaacttaccaatattggcagtagttatttcatcaacttgtcctaatttcattcgactaattgctttcgccgcaatattaatagcactaacaccctcttttggcgtacttgcatgagccgttttgccaaaaattttagctgaaattaacatttgcgtcggtgcacctacaaccgtagtaccgacatcagcacttgcatcaatagcataaccaaagtccgcgtccaacaactctgaatttaattctttagcaccaattaaacctgattcttctccaacagtaatcacaaattgaatttgtccatgtgggatttgttgttcctttatcacttgcaaaacttcaagcatcgctgctaatcctgctttatcatctgcacctagaatagtcgtaccatcagagtatatgtagccgtcatcttttacaattggctttacattaattgcgggtacaacagtatccatatggctcgtcaaatataatttaggtacttcgccttcttcgatagtactattcattgtacacactagattattggcacctaatttaggatgtttagccgcttcatcttctttaacatctaaccctaatgctatgaatttttcttttaaaataggttggattgttgattcattccctgtctcagaatcgatttgtacaagttcaaaaaacgtattaagtaatctttgctcattaatcataatggaaccccttttatcaaaattttcatgtacgccaaacggtaaaaattgatgaaataaaatgttacagtaattgacgttacacagatttatcaggtttgtaaattgtgtcatattattttcaatttattatatataattattgtaactcaaactaagctttgtcaaaaatatattgattgatttttcaaagatatcgtataatgaggaaaatgacataagcaaacttactcatgttttttattatattcctttatgatgattgctagttatatcgtctcaagttaaaagttttatatcttatgtcgtaattattaatacaaaggttattcatttggaggcacacaaaatgcaaaataaagttttaagaattatcattatcgttatgcttgtatcagttgtattagcattgttattaacgagtatcattccaattttataaactatatctcaactacctatacaaaatcatacaattaaaaatccatccattataaacgcatgtattaataagttatcgtattgcaacgattactttcaaacatgggtcatacggatggattattttttaagctacttcactatgcattttcaatgaaccaaattgcgatttgatttgtaaatattcttctaattcatttaatatttgaataatacttgctctcgagttaagcgctttgtgtgttgttggcaatggcagttcatccaatttcaaacgcgtctcatacaaattgtgtaaacgcattgctgtatagtcattactattcacatttagaccaatttctttcagcagtgacgcaacatcatttaaaagcggatctttatgacagatactttcgatgagcggtttcattctcattaacaattccacttgctcttctcgcatatcaaaataatgatagtatgaattttcgtttctaacaaaatgatttttaacatctcggaacgcgatagacttcgcctttttaatatttaaaagtaacacttcaaattcaatcgcaatggtatcttcatatttttcacaaatataactatatttactaaaaatatcagcaatttgttgctcaattttacatttgtattcgtctagttgtttgtctaaacttggcatcattaaattcattgtaaatgcaatgcttagtccaattaacagtaataatgtttcattaacaattaaatgtgcatcaattgattttgcattaaaaacatgaagtaatataacgcaactcgtaatgacaccttcttgtacttttaatacgacagttaatggtataaataacaatacgataataccgagtacaattggactctgacctaataaactaaatattgctgaacctaaaaacaatactaaaaaacatgatactaatcttgaaataatcgcttgtagcgaatgtacttttgtatgtttaatacataatacgactaatatggcgcttgaagcataattatctaaacctaacagcttactaataattacacctaaagtcatacccactgctgtttttattgttctaaatccaatcttgtaaggatttaactttaacatgggttagcgcctcttatctttcttcacaatatttattgaataatgtttgtaattgattaattacgttcatcacatcatgaccttcgatttgatgtctttcaatcatttctgtaatctttccatcttttactaatgcaaatgacggacttgaaggcgcataaccttcgaagtattcacgcgctctttgtgtcgcttctttatcttgtccagcaaatactgtcactagacgatcaggtaatacgtcataatgtaaagcatgtgatgctgctggtcttgcgataccacctgcacaaccacatacagaattgatcataactagtgttgtaccatcttgtttaagaactttgtcaacatcttctgcagtagttaattgctcatatcccgcagattcaatttcattccttgcttgttctacaacaccgttcatgtataaatcgaaattcatgtccataagttcaatcacctatccctttatatttaaactatcctcattctactaattaataacatattgttcaataaactaatctgaatcacacctatatttagacacaattttaacaatataccaaacattattgtgcttaaaatcatggtaactaatttgttcacatgttttcattaatatgtttcaagtatgatgtcttattttgactttactgcaaaaatgcattcaaccatgttgattattgttctttatcttttttgaatatattgcacatattttagtgccaaaaaataatacatccatcgacaagaacaagataaaacaagttgtcgatagatgcatctatgttatcactaatatatatttgtattttctaaagtatactgttcgatacgctgtttaatatgattcataaatttacctgtttgtaaaccatctaaaatacgatgatcaattgaaatacataaattaaccatgttacgaattgcaatcatatcattaattactactggctttttaacgattgattctacttgtaaaatcgctgcttgtggatgatttataatacccattgatgatactgaaccaaatgtaccagtattatttaccgtaaatgtaccgccctgcatatcttcagctgtcaattgcttattacgcgctttcgttgctaaagtattaatttctctagctatacctttgattgacttttcgtctgcatgcttaatcacaggtacgtataatttattttcatcagcaacagcaattgaaatattaatgtctttatgtaagacaatttcatttccttgccagctactatttaataaaggatatgcttttaaagcatctgctacagcttttacaaagaaagcaaagaacgttagattatatccttctttatttttaaagctgtttttataatgatttctcgtattcacaagatttgtagcatctacttcaatcatcatccatgcatgtggaatctctgttacactattaaccatattttgcgcaattgctttacgcacaccatttactggtattgtgctgttttcactattgtcttcagatgattggttacttgatgtatctactgatgttgattttgtttgaacttgtttgtcagattgagctgtggtaccaccattttcaataactgacattatatccttcttagttacacgaccttcaaatccactacctacaacttgtgataaatcaatgtcatgctctgaagcgagtttaaatacaacaggtgaaaagcgaccattattacgtggttgattttgtttagcagtagatgtctgttccactgttgcactagcttttttagtagatttctgagtatgctcatccacttttgcttgtatctcttcagttgtttcatttgtcttttcatcagcagtttcaattttacagataattgtatcaatagctactgtctgccccgcttcaactaaaatttctgtaattgttcctgatatcgtggaagggacttcagctgtcactttatctgtaataacttcacataatggttcatattcatcaatatgatcaccaacagaaactaaccattgttcaatggtgccttcatgaacactctcacctaacttaggcattgttatttccatgactttccctccctagaattctgctaattcacgcattttatttaagattttttctggattcatcataatttcattttctaatacaggagaaaatggcatagatggtacatctggagcagctaaacgcatgattggtgcatctaaatcgaacaagcaatgctctgcaataatcgctgacacttctgacataatactaccttctaaattatcttcagttacaagtaaaactttacctgtatgtttagcacgatcaataattgtttctttatctaatggataaacagttcgtaaatcaacgacttcaacattgataccgtctgcagctaaaatatccgctgcttgtaaacaataattgaccattaatccataacaaaatactgttaaatcttcaccttcacgtttcacatctgcttttcctaaaggtacagtgtaatattcttctggcacttcttcctttaagaaacgataagcttttttatgctcaaagtacaatactggatcatttgattcgatagatgataataaaagccctttagcatcatacggtgtggaaggaataacaattgttaaacctggcgatgaagcaaatatactttcaatactttgtgaatgatatagtcctccgtgaacaccgccaccaaatggtgcacgaatcgttaatgggcattgccaatcattatttgaacgataacgcattttcgcagcttcactaataatttgatttgtcgcaggtaaaataaaatctgcaaattgaatttctgcaattggtcttttacctaccatagctgcaccaatggcagttccaacaatatttgactcagctaatggcgtatcgataactctgtcttcaccatatttttgttgcagtccttgagtagtaccaaatacgccaccttttctaccaacatcttcaccaagaataaacacatctttattttgttgtaatgctaagtcttgtgcctggcgtatcgcctctaaataagataatttagccattagttaagactcccttcttcgtacacaaatgcataggcttcttcgacacttggatatggcgcgtcttcagcagcctttgtcgctttattgatgatgtctttatgctccgcttctatttctgccaaccaagcatcatcgataatgccagctgaaagcaactcttttttgaacttttcattgcagtctgcttttttaagcgtttcacgctcttctttcgtacgatattggtcgtcatcatctgatgaatgagctgtcatacgacttgttactgcttcaatcaaagttgaaccttgaccagaaatagctcgatctcttgcttctttcatcgctttatacattgctaatggatcattaccatctacttgttcaccatgtataccgtaaccaagtgctctatccgataatttttcagctgcgtattgtaatgaatcaggtactgaaattgcatatttattatttataatgacacatacaaaaggaagtttgtgtacacccgcgaagtttaaaccttcatggaagtcaccttggtttgagctaccttcaccaacagttgctgttgcaattttcttcttaccatccatttttaaagctaaagcagcaccaacagcatggggtatttgagttgctaccggtgaactttgagacaaaatattcttagctctactactaaagtgtgatggcatttgttttccaccagagttaacatcgtctttctttccaaacgctgataaaaacgtatcatacgctgagatacccatataagtaacgaaagctagatctctataataaggcgctgtaatatcaccttcttctaatgcgtatgccatcccaatctgagttgcttcttgtccttgaccacttacaacaaatggaattttacctgcacggttcaataaccacagtctttcatctatttttctacctaaatccatccatttatatattacttttaggtcttcttcgctaaggcctaatgatttataatcaatcatgttaaatcctcctatttatacgtgaatagctctactttctgctttcaatcctaattccatcaacacttcagagatggaaggatgtgcgtgtgttgttagtcctaattctaatgccgagccattcatgaactgtaacagtgatgcctcattaatcaattctgttacatgtggaccaatcatattaatacccacaatttcttcagttgattgatcaatcaccatttcgctatacccttcgtttgtgtcatggctatcaatcactgctttaccaattgctttaaatggtactttaaaacttttaactttcattccctctgcctttgcttgttcaatgtttaaaccgatagaagcaatttcaggttgtgaataaatacacttaggcatcatgttatagtttactgggattgggttcccctcaaacatatgatcaacagccacaacaccttcttttgatccaacatgtgccaattgtaattttcctatacaatcaccagctgcataaatatgtttatcttcagtttgttgaaattcgttcgttaaaatatgtcctgatgttgaaagttttattttagtgttgtttaaaccaatatctgatgtgttaggttttctaccaatcgatagcaacactttatctactttaattatgtctgaggaaatttcaaacgtaacaccatcttcgttaacatttatatcattttcagaaagttttattccctcatagaatttaacaccacgtgctgacaatgatttttttaatagttgtgaagcttgtttactttcagttggtaaaattctttcacctgcttctataactgttacgtcaacacctaaatctatcatcaatgatgcaaattccattccgataacaccaccaccaataataccaatacttgatggtaacgtctttaatgataatatatcatcgctagataaaattttatcatgatcaaatgataagaatggcaactctgcaggcgaagaaccagttgcaattaatacaaattggttgggtaataagtctgattcaccatcttcatattcgacagaaattgtgccactttgaggtgaaaatatagatgtacctagaatacgtcccgtgccattataaatgtcaatgtgattgtgttgcattaaatgctttacaccttgatacatttgattaataatgtcttcttttcgtgccaacatattttcaaaattaacattagcatctttgacatcaacgccaaacattgctgcctgttttactgtttgaaatacttcagcagatttaagcagcgatttagtaggaatacaacctttatggagacaagtacctcctaatagttgtcgttctactattgccacttttttacctaattgagacgcacgtatcgcagcaacatatcctgcagtacctccaccgagaacgactaaatcatattgtttctctgacatgttcttactcctaactaatgatatatatccattgaaaatttattaatacatagttttcatgtccattaattacctattttacatgattgtctatttagtttgaatgcacataaataaatccataaatgagtattcaacacactttggaaattatctacgtctttgattgtgttgtatcatttctcttgcattttctcgagttaaatcagtaacacttgcacctgaaatcattcgtgcaatttcatctactttatcatcgctaattaactcttgaacttgtgttgttgtacgatcatcttttgatgatttcgaaattaataaatgatggtcgctcatcgatgcaacttgtggtaagtgagagatacaaataacttgtatatattctgctatatctcgcattttctctgccattttttgtgcagcttgtccagatacacctgagtcaacctcatcgaataaaattgcagtttgacctctcgatttaacaaaaatactttttaacgctaacataattctagaaagttctccacctgacgcaattttatttaaactttttaatggttcccctttatttggactgattaaaaattctacaaattcgattccatcaatattcggttcttctaattttttaaatgaaatctcaagatttgcgtctttcatttgtaagttttgaatttccgatacaatgtggtctcttaactccctagcgactatacgacgctgctttgataacgcttgtccaacctctataacttgattatacaatgcatttatttcttctcgtaactgcgatgtactttgttcatagttttcaattttattgatttcattattaagcttttcttgatatgcgattaattctgaaatatcttttccatatttacgttttaaattattcagcaaattcatacgagattcatactcgtttaacacttgttcgtcgaattctgtattagccatttcatcatataactcatgttttgcatcttctaaaatgtagtaaaattgatcaatatcttcttttaatttgtcatatttgtttggaactatatcgtttattgttaacaaatggttgcttagttcatataaacgatcagtgatagcattttcatccgttaatgtcatatgtgcgttattaagcgctaagcttaatttttcagagttttgaatgcgtttaatatctatttcaagttgctctatttcgccttcttttagatgtgcttcagacaattcttctaattggaatttcattaaatctaaacgctgtagcaatgcttggtctgctgattctaaatcttctaactcttgctttttggctttataattttgaaaagtttggtgatatttatccaacaaatcttgataacgtgattctgcgtaattatccaataatgttaaatggtatttttgtttcaacaaagactgcgtttcatgttggccatgaatatctaataattcttgcataacttttcgtaaatcttgtaaagtaactgtttgattattaattttacaaagacttttaccagagctgaaaatttcccgtttaactaataaaaaatcttcatctacatcaatatccatatttttcaatatatgtatagcatctttactctcgtcaatatcaaatataccttcgatgacagcctttttttcaccatgtcttacaaaatcagatgaagctctcattccaattaattgtccaattgcatctataataattgacttacctgaacccgtttcaccacttaaaacagttaaaccatcagaaaattgaatttctaattcttcaataatagcaaattgcttgattgataaggtttgtaacataaactcatcgcatccttataacaaattgaaaattcttgacttgatttcatcacttgcctctttgcttcgacaaataattaaacaagtatcatcaccacaaattgtgcctagtacttcttcccaattgatttggtctaatatagctccaatagattgtgcattaccaggtaatgtttttagaacaagtaaattatcagtaccatctatattaacaaaggaatccattaaataacgtcccaatttttctaaaggatggaattttctatcatttggtaaactataaacatattgacctgaaggtataggtactttaataagttgtagttctttaatatcacgagaaacagttgcttgagtgacatttaaatcataatcgtttaatcgtttaactaattcatcttgtgtctctatctgttcatttgaaataatttctctaatttttatatgcctaaccgattttttgggcacagtaaacacctctgattacgaatatttatacatttattttaacacatgcactgatttacgactactaaacacctttacgtaaaaagggtaaacatggtttatctatcttggttatctatttataaatatttttcatattacgcataacaattgcttaaaatatgtataaaaatgaatatatgtgtaataaacttgctaattattagatttaataagcgtcaattgtttgaacatatttaattaaaatcacattgatatcacagatacgaatattgtcgtatagaaattgaaaattctattttttaaatgaaagtcttcaacataattttaagtttcaacatgagaaaaatcgattaacaaacaacgtcagttgaatatgccttttgagacatttcaaactttacaattgttgctaatcgatatatttgcttttagtgatccctgctataaaataaatcaacgatttctaataagtgttttgtattgaattgttcatcaatttgcgttagttcatccactgctgcgtctctatgataagtcaatttatcttctgcgccatctttccctaataaactcacgtacgtacttttattattttcaagatcgctgcccacttttttacctaactttgcttcatcaccatagcagtctaataaatcatctttaatctggaacatcatacctaaatgataactataactttctaaatgttctttagttgtatcatcgacattagcgatatctgctgcactcataaccgcaaaagttaataatgctcctgtttttgttttgtgtatcatttccaaagtttcaagatcaattggttggccttcgctttgcatatctaacatttgaccgccgaccattccaacatgaccacttgctattgacagccgttgtagaacttttatttttacttcatcagttaatctatcatcacttgaaataagttcaaatgctttagttaataaagcatcacctgctaatatcgcagtccactcaccatatactttatgatttgttaattttcctcgtcgataatcatcattatccatcgctggtaggtcatcatgaataagtgaatatgtatgaatcatttctagtgcaattgcgctcttcatacctaactcatactcggtatttagtgaatctaaagtgagtaataacagaactggtcggatgcgtttacctccagcatttaatgaatacaacatactttcttctagctgagtatccattactgatttatttatcgcaaccgataattcattattgacttcatctattaatttattcatcggtagattcgtcattttttacatcctcagcttcttcttttattaagtcattcacctttttttcggcattttttaaagttgtgtcacaagctgctgatagtttcataccacgttgatataaatctaatgattcctctaaagatactgtttcattatctaatttttgaacaatttgctctaattcttgcatcatttcttcaaaactttgcgtttctttagtcattattacaccttactttcgtaacttttgcatctactaagccatctttcattgttaatgtcaattgatcattttctgttaaatctttagtactcgtaatgacttcgtcttttttattaacaattgcatatccacgcaacattgtattagttggacttaaattgtttaagttttctactttatttttcaaatcatttttataacttaatatcttagaattcaataatttaacaagttggtttgtcaattgaagattattttgttgttcttgattaacactacttagtaatgcttttaaattataacgttgttgcaacagcattaatcgatgtctctgttgttcaaaagttgcctgaatttgttgtttcagtctcttttctaaatcatctcgacgttgtatctgttgatcatacaataaagttggttgtttaaacttgtaatacgatgacaaatgttcaacatgtttacgttgttgttctaaatgtttcttgatgaaacgagtcaatgtaaactgatattgctgtatttgttgcagcaattcatattggtctggtgttgcaataacagcagcttgagttggagtcgcagctctgatgtctgcagcaaaatcacttaatgtaaagtctgtttcatgaccaactgctgatataatcggtgtcttacaattatatattgcacggacgacagcttcttcgttgaaattccataaatcttctatggatccaccgcctcgacctacaataatggtatctacacctaaactatctgcatattcaattttttcaataatgtcgtcttttgctttttcaccttgaaccaaagtactaatttgtatttgttcagctaatggaaaacgactatttatcgttgaatggatatctcgaattgcggcacctgtactcgctgttaaaactgcaatttttttaggaaacttaggtattgatttcttattcgctttatcaaaacaaccttcttcagttaattttttctttaatgcttctaatttttgatataagttccctataccatctaattgcattttatttacataaatttgatagtttccacgacgttcaaaaacagaaacacgtgcttctaataagacttcatctccttctttaggttcgaagtttaatttagaagcactacctttgaacatcatggcacttataacgctttctttatctttcacattaaagtataaatgaccacttgaatgctttttgaaatttgaaagctcacctttaatcaatacagattggagatgtggatcttgatcaaatttatatttaatatatttcgttaaagctgaaacacttaaataatctgacatataacatcactcaattttatttttttatattactcaatacaccatttataaatttataatgatcatcatcactgaattgttttgttaattcaactgcttcattcattacgactttagcaggtgtatcactgtgtaatatttcatatgttgccattcttaaaataatacgatccgtttttaataaacgtgcaatagtccaatcttttaaataaggactaattgtctcgtctaatacaggttcgtgatctttaacgccagaaactagccaatgaataaattcgaagtctaaatctggattatcgtctttaataaagcttatcgcttcatttatcgttaaatcactgtccttcatttctaattgaaataaagtttgaaaagcttgcactcgggattctttacgactcatttttaactccttcaaacgtttgtatttttctttatttaattactgaattaggtatgacattacttttcaataacgatttgtgtaatgtgaatattaatttgcttaggttctatcgctgtcatattagaaattgaattaaaaattgacgtttgaattttgtttgcagtttttgaaatattaacaccatgttttaatgcacaatatacatctatatatatgccatcttctttactctcgatttttaaatcacggcttaaatttttacgactaactttttctaaatttgtttcttttaattcagcaaaatggccagtgatgccttcgacttccgaagtagctatacttgcaataacagatagcacttctggcgctatttctactttacctaattttgaatttgaataatcagttactttgaccatggattgacctcctattaaccttcatcattcataatgctattttgctctaaaaagtttgtattaaatttaccgcttctaaatatatcgttattcaataatttaatatggaatggaatagttgtatcaataccaagaaccacaaattcacttagtgcacgaatgccagccataatcgcttcatctcgtgtcggttcatgtatgattaatttcgctaccatcgaatcataatatggcggtatcgtataattagtataacatgctgactctattcgaacaccatatccacctggtgcaagatattgctcaattttacctggtgatggcataaagttcttgtaaggattttcagcattaattctaaattcaattgcgtgtcctgttaatttaatatcttcttgtttatacggtaacacgtcacccatagcaacttgtaattgtaatttaactaaatcaattcctgttaccatttcagttacaggatgttctacttgaatacgtgtattcatttccataaaataaaatttattatcatttaaatcatatataaactcaattgttcccgcattttcataatttacagctttcgctgcacgaactgcggcatttcccatttcacgacgtgtttcatcatctaaaattggggaaggtgcttcttccactaatttctgcatacgtctttgaattgtacaatcacgttctcctaaatgaattacattaccatagctgtccccaacaatttggatttcaatatggcggaagttttcgatgaatttctccatataaagtccaccattaccaaatgcagtttgagcttcttgttctgtcattcggaagccagtttcaagttctttttcatcacgagcaacacggataccttttccgccaccgccagcagtagctttaatgatgaccggatagccaatttttttggcgattttcttagcttctgagacgtctttcattaaaccgtcactaccaggaacaactggaacattggctttgatcatttctgccttagcaacatctttgatacccattttttggatagattgataacttggtccaatgaacttcaattggcatgcttcgcataattctgcaaaatcagcattttcagctaaaaagccataacccggatgaacgccatcacaacctgtagaagttgcaatagataagatgttcggaatatttaaatatgaatctttagacaaagtgggacctacgcaatatgcttcatcagcaatttgagtatgtagcgcatctttatccccttcagaatagattgcaacagtttggatgcctaaatcacgacaagcgcgaataatcctaactgcgatttcaccgcggtttgcaattaaaacctttttcattatttcaccttaaataacggttggccatactctaccatttgtccgtcttctactaagatttcaacaatttcacctgaaatttctgcttgaatttcattaaatagtttcattgcctctaaaatacacactgttgtttcatttgaaacagtgtccccaacttgcacatatgcttcttcgtctggagatggcgatttgtaaaatgtacctaccataggtgcattaattgttttgtgattatctgaagttggctttggagcttcagttttattgctatcagttgattgtgcttgaggcataggcattgccgcagcttcaactggcatttgtgagatttgtggcgtgataatctcagtttctttttctttcttaagcgtcactttgcctttagtatcttcaatattgatttccgttaaagttgatttatccagaatttcaattaattctttgatttctttaaagttcattattactgactccttcagtttgttttcatctacccgtctattttacttgagacaactcttcaattcaagcatgttcatattgctggcgacattataagtctatcccaaagttataataaaaccacattttaaattaaaaacacttgtgtatttattacttaacattgactcatcttaactcttgattaaaaattttatgcattcagttaaacatatcaatgttatttttattagctattatgttttatcctcaacaatatgatatgtagatatatacctttactcatgtctatgttttttcactaccaattagacgattcgttttatattttaaaaattattttaaaaataaaaagcctcatatcagcatataacctataatcattttaggcaatagctttatgagacttatttagaatatcttacgttaaatcagtatagtgaatacaagctatttgttaacaaattagagattatcctcttgaaatgtagcttccatcaccagtgttgataattaaaacgtcaccttcgtttacaaataaaggtacatttaatgtataaccagtttcaacagttgccgatttagtggcaccagttgcagtatcacctttaataccaggttctgtttcagttactgttaattcaacagttttaggtaattcaacaccgatagtttcaccttcgtatgtttgaatttgtacttccataccttcttttaagtaattcaattcttcttttaagtaatcacttgaaagttctgtttgttcaaagctttcattatccataaatacatgattatctccgtcagcatataaatattgcatgcgacgattttcaatcattgctggttcaactttttcaccagctctaaacgttttctcttgaattgcaccagttcttaaattacgtaattttgaacgaacgaatgctgaacctttaccaggctttacatgttggaagtctataactttccaaatagcgttatcaacagaaattgttaaacctgttttaaaatcattaaccgaaatcattcagtttcctcctcattttacacgcttatgttaaaactataaggtcttttgtgcatttagtaaagacttgacaaccattttctgtaattaaaatatcatcttctattcttataccgcccaaaccttctatataaacaccaggttctactgtaacacagttgttaacttgaagtttatcttgtatcgtacgagccagcattggcccttcatggatttctaaaccaataccatgtcctagtgaatgtccaaattcttttccatacccttttgactctaaatagtttcttgaaatggcatcagcttctgcaccagtcatgccaggtctaatctcattaattgctttcatttgagattcaagtactatttgatatatttctttcagtttaggatctggttctccaatagcaaatgttctagtaatatctgaacaatagccgttataatacgcgccaaaatctaatgtaatcatgtcgcctttttcaataattttatcacttgcaacaccatgtggtaatgcacctctatgaccagatgctacaatcgtatcgaatgatggtccatctgctcctaattctagcattttgctttctaatattgcctttaattctttttcagtcatgcctgcttttacaacagttaaaatatattcatatgtttcatcaacaatattagctgctttttgaattaaagcaatttcgtcagcatctttgacgtctctaattttatctacagtattagaaatgcttattaatgatatacggcttttatttaattcaaggtatgtatcataacttacatgatgcccctcaaaacctacattttcaaaattttcttggtgtagcaattctttaatctcaccaataatagtagatttacgattaataatttcataatttggcgcctgcttagttgcttgatcaatatatctaaagtctgttatcaaatattgtttatctttagatatgataagtgctccactggtaccagtaaaacctgataaatatcttctattgtaatccgaaagaatgataatcgcatctaaatgtttttgttctaaaatacgatgcacttgtgttattctgctcatcttattacctcctagtgaaacgtttgtgcatttcaactttatacattaaaataatatcataataaggataaaaaataatagatattgattttagggagatagtaatgaaaaaattggtttcaattgttggcgcaacattattgttagctggatgtggatcacaaaatttagcaccattagaagaaaaaacaacagatttaagagaagataatcatcaactcaaactagatattcaagaacttaatcaacaaattagtgattctaaatctaaaattaaagggcttgaaaaggataaagaaaacagtaaaaaaactgcatctaataatacgaaaattaaattgatgaatgttacatcaacatactacgacaaagttgctaaagctttgaaatcctataacgatattgagaaagatgtaagtaaaaacaaaggcgataagaatgttcaatcgaaattaaatcaaatttctaatgatattcaaagtgctcacacttcatacaaagatgctatcgatggtttatcacttagtgatgatgataaaaaaacgtctaaaaatatcgataaattaaactctgatttgaatcatgcatttgatgatattaaaaatggctatcaaaataaagataaaaaacaacttacaaaaggacaacaagcgttgtcaaaattaaacttaaatgcaaaatcatgataggagtcttttaatgcgtaatataatattttatcttgtacttattattgctgcgattggattagtaatgaatctagatgcctttattttttcaatcgtcagaatgttaatcagctttgctgtaatagctggtattatttatctgatttattatttcttcatcttaactgaagaccaacgcaaatatcgcaaagcaatgcgtaagtataaaagaaatcaaagaagaaaatagataaaaaaacggaagcacttgtaggtaaaatagtctacgtgcttccattttttattctaaaaactactttctaaacatccattcatctgaacgatatttttcagttaattcttccacttctgccaattgagcttctgttaattcaagtggcttaaattctatatttaaacctttcttaaaacctttctcgaaagcttcttccatttgactaatagtaatgtgttcatctgaaatatcattgatggcaactgctttttcaacgaatgcctctttcatttttaattttaatctttcatttttataaataaacatatcaaacagttcatcaatatcaatatcttgtaaaatcgaaccgtgttggaggattacgcccttttgtctcgtttgagcactcccagcaatcttacggccttcaacaactagctcataccaacttggtgcatcaaaacacactgaacttcgaggttgttttaatttttgacgctcttcaggcgttttaggtaccgcaaaataagtatcaaatcctaagtttttaaatccttctaataatccttgtgaaatcactctgtacgcttctgtaactgtagaaggcatattcggatgcgattcaggcacaatcacactgtaagttaactctttatcatgtagcaccccacggccaccagtttgacgccttacgagaccaaaacctttctctttaaccttatcaatatcaatttctttttgtagcctttggaaataccctattgataatgttgcaggattccatgtgtaaaaacgtataactggatcaatttcacctctagagacaaaatttaataacgcttcatccattgccatattataatatgggtctttacttcctgtattaataaaattccaagtttcagtcatattcaagaactcctatcagcaaaatgtataatatttgattcgctaattaatcaatttaactaaatgaataataattgcaattctttagtgaaatattttgataatttgacctaacagtcttataattatattatcgtttaattagggaggatgcaagatgagtgctagtttgtacatcgcaataattttagttatagcaattattgcttatatgattgttcaacaaattcttaacaagcgagctgttaaagaattagatcaaaatgaattccataatgggattagaaaagctcaagtcatcgatgttagagagaaagttgactatgactacggtcacattaatgggtctcgcaatattcctatgacaatgttcaggcaacgattccaaggattaagaaaagatcaaccggtatacttatgtgatgccaatgggattgctagctatagagccgctcgtattttgaaaaagaatggatatacagatatctatatgttaaaaggcggctataaaaaatggactggaaaaataaagtctaaaaaatagtttttgtaaatttaatatacgatttaataaaatctgagtgttaattgatcatcaataacaatactcagattttaattttttaacaaagtctgttactatatttctctagcttcactgatcattaaacttagtttcagcataataaagaaagttcagctcattttcaatacgattcaattaccgcaatctaaaaaatgaaaagacaatttctatgaaagaataataccaaaccctaagagttattacttcggtttagttttcttgtttaaatagaaattgtctttttcaattgattttgaaaccattatccttaaatcttcatacaaagttagaataataattctcggaatatgtgtttaatactttatttttcctgtttaagattttcaaactttaatattggtttacgagcagctgtagcttcgtctaatcgatcaatcacagttgtatgtggtgcttctagcactttatcaggatcatttttagcttcttcagcaatactaattaatgtatcgataaaataatcaagtgtttctttagactctgtctcagtcggttcaatcatcataccttcttcaacatttaatgggaagtatattgttggtggatgtacaccgaaatctaataatcgcttagccatgtctaaagtacgtacaccaaattctttttgacgcacaccacttaacacaaactcgtgtttacaatattgtttataaggtatttcaaagtgtttagataaacgtgctttaatataattcgcattaagaaccgctgcttcagaaacctctttaagtccagttgctcccatagttcgaatatacgtataagctcttaagtaaataccaaagttaccataaaatggttttacacgtccgatagaatttttaatgtcattatcatatttaaatttgtcgccatctttaataaccattggctttggtaagtaacttgctagttcttttactacaccgactggacctgaaccaggaccgccaccaccatgtggaccagtaaatgttttatgcaagtttaaatgaacagcatcaaatcccatatctcctgggcgaactttgtccataatagcgtttaaattcgcaccatcataatataatagaccaccagcattatggacgatttcacggatttccataatatttttttcgaaaatacctaaagtgtttggattagttaacataatagctgctgtattttcatttacaacacgtttcaagtcatcaatatcaacttcgccacgttcgtttgattttacagtaactgatttaaatcctgcaaatgaagctgaggctggattcgtaccatgcgcagaatctggcacaatgacttcatcacgatgaccttcaccattattctcatggtaagctttaaatatcatcaatgcagtccattcaccatgtgcgccagcagctggttgtaatgtcacctcatccataccagtaatttcttttaattcttcttgcaaactataaataatttctaatgaaccttgaacttgatcttcatcttgtaatggatgtgattcactaaatcctggtattctagcaaccttttcattaattttagggttatacttcatcgtacatgaacccaatggataaaatccgttgtctacaccgaaatttttatttgaaagttcagtataatgacgtactaagtctagttcagcaacttcaggaaactccgctttgtttttacgaataaatttatcatctaacaatgactcaacagaatttgttttaatatcactttttggtaatgaatatgcatatctgccttcacgagatctttcaaaaattaatggacttgatttactagtcatttaactcaccagccttttctacaaatgtatcgatttcatcttttgttcttaattcagttacagctattaacatgtgatttttaaagtcgtctgaaacaacacctaaatcaaaaccaccgataatattgtacttcactaattcctcgttaacttgttgaattggtttgtcaaatttgactacaaactcattgaaagatgtaccatctaatacttcaaaaccttttttaataaattgttgtttagcatagttagcatgttctatattttgaactgcaatatcatagataccttgtttaccaagtgctgacattgcaattgatgacgctaaagcatttaatgcttggttagaacaaatattagatgtcgctttatcgcgtcgaatatgttgttcacgtgcttgtaatgttaatacaaagccacgattaccttcatcatcttgtgtttgaccgactaatctacctggcactttacgcattaactttttcgtcgttgcaaaatatccacaatgtggcccaccgaattgagcaggaattccgaatggctgagtatcacctacaacaatatctgcaccaaatgaacctggaggtgtaagtaatcccaatgctaatggatttgcatatacgataaataatgcttttttatcttcaataaagctatgaatcttttcaagatcttcaattgaaccgtaaaagtttggatattgtactgcaacagctgctgtttcatcatccactgctgcttctaattttttcaaatctgtaacagtgccatctaaatcgatttccactacttcgaattccttacgcgtcttagcataagtatgaagtacttgtaatgcttgataatgtaaaccttttgagactacaattttatttttctttgtttgactaaatgctaagatacatgcttcagcaaagctagtcatcccatcatacatagaagaatttgctacatccatatctgttaattcacaaattaaagtttggaactcaaaaatggcttgtaattcaccttgagaaatttccggttgatatggcgtatatgctgtgtaaaattctgatcttgaaatcatagcatccacaactgatggcgcgtaatgatcataaacaccagcacccaaaaatgatgtatgcgtttctttagtgatattcttgcttgcaatgcgatttaatcttctaagtaacgttgtttccgcttcgccttcagcaatatttaaatctctatttaataaaatgtcacttggtacatcaccgaataattctcctatagattttgcaccaattgtttgtaacatttcttgcttgtctttttcagttaaaggtatataacgatgactcacaatgcacacccctttttaattatttatcaatttgatttttcttaacaattttcgcttttaattgacgcttacgaacttgaacaagcaactctctacccatttcaaactcatctctttttatcattgcaagtgcaattgattttcctgatgatggagactgtgttcctgaagttacttctccaataatatttccatctaaatccataacttcataaccagttcttgcaattcctttttcaagtaattctaatcccactgttcttcttggtgcaccattttctttttgatcttttaatacagatttaccaataaaatcagcatcaattaatggtttacttgcaaaagcgataccaccttcatatggtgtaattgattcagttaaatcttgtccatgtaatggcaatccagcctctaatcttaatgtatcacgagcgcctaacccacatggcataacattatactctaataaaccatcccaaattttttcagtatcatcgatattacaataaatttcaaacccatcttcacctgtgtaacctgactgagataaaatgacgtttgctccaaataatttgacaccctgtttaaattcaaacattttcatttcagttacatcttcatcaactaattgattaattaaatctctagcttttggtccttgtattgctaattgaccatattggtttgatacattttgtacttcaacatcaaatttctctttgtgttttaaaatccaattaaaatctttttcagtattagcagcattaacaactaataaataattgtcgtcagctaatttatatattactaaatcatcaataataccgccttcttcattacataaagcagtatataatgcttttgaagtagttaaattatcagtatcatttgataataaatattgcacaaactgactagcatctttacctgttacttcaatttcacccatatgactaacatcaaacaggccaatttcgtatcgaacagcattatgctcctctttaatacttgaaaattgaacaggcatcgcccatcctccgaattccacaatttttgcacctctatcaacataattttgatataaaggtgtttgttttaaatcacttgacattgaaatacccccttaaaattataaaaacaggatagcaatcgctaccctgtttataaatcaccaattcaggaacgcgttacagtattatccttttgcctgagagtttcgtaataaattacttgcaccttcggcgatagagtcttaacgctctattctctctaatactgatcactcgcttttattaaatttagcaattcataatatatttctgaaattgatagcaaatgactatcaaatttcttgaatgcgatttcattatatcttaaattccgcgagcaatacaagtcatttaactgcttgattgtcttattatttgcattaggtcgatgtgggtcatcattgattcgactatatataatatcaatattacaatctaaccaaataatgtttttttgatttttcaaaaaattaaatgcctcttcactctcaataataccaccaccagtagcaattatatctgcagtgttaatacattcttgcaaacatgtgaactctaaattcctgaaatattgttcaccatgtttacaaaatatttctggtattgttaacttatacttctcttcgatatatgaatctatatcaataaatgataaattttgctcatctgcaacgtatttaccaatcgtagatttaccggtacccatgaaaccaattaaaattattggtgatttatcatgattcatgcgttttcccttctttcaataacaaaacaatcttatagttatagtcagtttcaatattatataatgtctttaattttaaactatattgactgatataaaaagtgaaaatggaaaaataaattgctgttagcatcaataagaacggcgtaacatatcctttttctttatataaatcaaaattaataaattatttcacatcctttttaatagtactcatttaaatactagtaagttatacataaatagttttagtctgcacatttgtaccgactttaactgttatcgttattttaataatggatttatagtagatatttgcagtaaatgctgtaacattattaatcattgttatatttcctctgtcatttacaactttaataattttattattaattaatttgtattcgatcatttcttcacctttatgtaaaatgatacggtgttgcctaatttcaatatcgtttctatctactcctttaaaatcatctagaatatctcttgagaaaaattcgaaatctacagttgttaaatccctactttcaattagaaaagttttactaagtctaattaagtctggaacaattagtaaagttatacttataaccatcatcgctactaacatttcaatgagcgaaaaagctttgacattaatactgtatacatgtcttttgataagaagtggtattttttgaaatagcacaaatttgttggtcactttgcttaatatcatacttccctatagttacccccttcttaagttcttctttattaattttagatacagtcgtcaaaattactttagaagcatcaattgtttgtagtttatggtttatactcgcttgcatttgattcatcattggtatcaatagtaatgtaatcaatccaattagcaaaaatccagccatactatctattaagaatgaacctttacacttatagcttttcataacgaattcttcctttttcaatatggaatattattctataaattgaattgttattgtaaattgttatgctaccaaatttattgatattcccttttttatcaaaggcaataatatcaacttttgcaacattaattattttgcctacttttaattttagaaatcgtattttattattctctattactttaatagtgtcactgttttcataaaatctaacattgatatatccttgatttgctatagcttgcgacttaatataattcaattcagtaataaaagaaatgatatttgcctcatcatctattactctaagattgcttaatcctttagatgtcattgtcaaaagtagaaatatactgattaacatcattaccacaagcatctcaatcatagtaaatgctgactgctttctaatttgcaactgcttctccattactaattgtgattgtctctcctgatttacatgtcttttgtgcttcttttataaaaccatctgcaattaagtcttcaatagacgatggatttctattatgtttcaatgcatacgcttcaatttgactattaaccatttttacctgtgcattacaacctgttgattgtatgtgagcagtttgtttagcaatatttggaatgattaaaattaataataaactgatgattaataacactaatagcatctctatcaatgtaaacgcttgagttttcttaagaaatttaaacatatattaacctccattattttatactttgcatcatttgaaacattggtaacataattactaaataaattgcgacaataaataaacctaaaatcaaaaataaaataggctgtaaaaactgagtctgttttatcgctttatcttctatttgttttactaatatttgcgaatataactttagttctacttctagcttccctctcttttcaccttgtagcacaaacttaattaattgaggcttaaagcattttagtttttctaaaatttgaggcaaaccatatcccatttctgaataagttaataagtatttacctagaaactgtctaaatggatcactactatggttaatataaacgtctactattgattgaagtgtaataccatttttataaaacaacactaattcattagttacaaaataagttttaaataattggaaatagcctgatattagcggtagtttcatcacaaagtttatcttattgagcatatttaaattgttataaattaatttcataataatagccaacatagatactattatgagcattactacaattatagtaggtaagctggtaatgaaaaaagacaatgttttttgaaaagaagatagttgaatattcatagaagtatataattgttgaaactgtggaattactgtgaggtttaatataataatcatagcaataaagatagaaactagtattaaggggtattgcagtgtctttaacaatcgttgttctgactttctattcactttcatataatttacggtttcttctagaacgtctataatattgccaaatctttctgccaaatatacttgcatgacgatagtatcgctataacctatcagtgataatatttgattgcatggtgcaccatttgaaatttcacttagaatggtggtacctaattgcttatttttatatgtcatttgaagatttaaaaattgaaaactttgatacagagtgaaaccatatttcaacaaattacataaatttgaaagtaagtcgatttgttgggccttacttaattgtcgcttcttagaatgtagtttaaatgtatttatgcattgtagtttcacaaatgacacctgcttttgtcatatcatcaagtttatcttctaagttcttaaatgatgatggtaatgaatgattatgggaaaagaaatatcggagttgttgctgagatagaatttcacatactaattgtcgctgttgcttaatagtagttacaagtcgttggtttataattaagttagttgcctgtatcaattcttgtacagaaatgcccatttctaatagccttaaaatagcacctttacaatcagttgcatgcaatgtagtcagaacaaggtgaccacttaaactagcctgtataacacacttggcaacatctttatctctgatttcacctattaaaataacatcaggatcacatcttaaaatagctttaaacgaatttacatagtttatgccagctttatcattcacattaatttggacgataccaggaatttgcatctctacaggatcctctatagaaattacatttaaattcaaggctttattcgcgtatgagaccatttgatacattaatgtactctttcctgaaccagttggtccactaaacaatagtaatccttgtttcttattcatgaggtgtttaaaatcattgaatttataagttgatttctgtggttgaaaaaattgaggtacaattctgataacacaactttcttggccaagtgacaatggtaaagttgatattctcaaaaaatatattttattgaaaaggtaactatatcgaccgctctgtgcgacttgctgtgtagaaacatcaagcccagcttgaaacttcatataaactaataacttttgataaatgctattcccaatttgttcatactgctccaagttatcattaattctaaatttaatacttacttcatttttaactggaataaaatgtacatcactcgctttcatttctatcgctttattaattatttcttgaaatagaatcttcaaaaaaacacctcctacatataatcacgtaggaggtgtttttattacttcaatttaaccgtgtaaaaatggatttaattgttcatcatcaaccgtcgtatatggaccatgtccagggaataaaggtaaatcgccttctaattcaaatattttatcttgaatagaatcaactagcgtttcataatcacctttatataaatctgtacgtccgattccattattaaataatgtatctccaacaactgcgaattcatcgaacacatatgttaaacttcctggtgaatgtccaggtgtgtgtaacacattaaacttaaatccttctatttctgtgctaccttcgtttaacttttcaggagttaccttacttgtaataattggtaatccatattgcttaaatttatctgccccatttttaacgggatcttttagaaaatcaaactctgcttcatgcatataaaccgggacatcgaatcgatcaactatatcatcgactgctccgatatgatcaaagtgtgcatgtgttaataaaatagcttttaacggtttatttatttggtttaattttttaataattttttcactttcacctgaagggtcaatcagaataacagctttgtcattttcgatgaaatacgtattagtatcaactaagcctaaagttaagcttgaaatcctcataggttttcaccactattttctaaatgtttttgtactgatgttagtttatcattcatttttctagatttgtctcgtcggtcatcaatacggatatttgtacaaactctacttaaacctttatcaaaaggtaattcatgtatcacttgcacaacttctaatacatcgcttaattcaccttcaattagagtattcattggtgttaattgaaaatcaattttacccattgctttatattcttgaagttttttctgaatatctgcaatatatttactaacactcggaccttccgttccaactggaataacaaccacatcaacaatagccattattttaccccctctttatctaatacataggtcttgattaatcctgctgctcctgtaatacctgcatcattacctaatttcgcttgtacaatttcagtttcaaattgagcaggtacaaatgttaaattatgatattctgttttaatattttcaattaaaataggtcctgcagtagacattcctccacctagaacgatatatttcggattacttgtaacactaataatactacataaatatccaatatagtttgcaaccttttcagtaatgaaaatacagaattggtcaccagcttttgccgcatcaaaaacagcttttgctgtaaccttattttctttaatcaattctaatatagaagatctaaacgtcaacttcggatagtagaagttaactaagttaacaacgcctgtcgctgaagcaactgtttcaatacatccagaacgaccacaattacatttaaatcgttgatcgaagtctgctctaaaatgacctatttctgcgccagagccattatgaccatgtacgatttcaccatttgaaataattcctccacctagacctgtaccaagtgtgatggcaacaacatcatcggcaccttcaccagcacctttgtgtttctcccctaaagcagctatgttagcatcattatctacatacactggacaatcaacgaattgttcaaaaatctcacgtacattaactttttctggccaatataagtttactgctccatttactgtacctttttcaaagtcaacaggacctggtacaccaatacctacgccaagtacatttgaaaaattataattattttcatttactttttcaacaaacgaatcataaattcctttcaaaagtgtatatcctgtactatcagatgtatcagtgtgaatagaccatttatgtaattgttctaattcaggtgtgaaaatacctaatttacaagtcgtcccgcctacatcagctgctaaaataatttttgtcatttctgttcattccttctctgattaattatcaacgtacatttcaaatattcttccttagataacagttcatattgatacaatgatgaaatctcctgttgaatcatttcgtacatatcttctggatttttaaaatatattagaaatccgtaacttttcaataactgttgtacatcataaaagttatttatttttcgactcatttgatttagtcaactctttttctaagttaatataatctgtatttttagggtctgcatttaatgctttacgcacatattttaatgctttttcatcatcatttaatgaacgatttgctatcgctaactcaaaatttaataaacctgatttaggaaacattctaagtcctcgctcccattctgtcataccttcggacttagaattgatagtagccataatcataccacttaaataatatgtttgatcatcggcataatttttatttattgtctgcttcacaatattttgagcattatcataattaccactagtcatatcatctttgatcaatttattataaatattatcttctttaattgtaaaaattctaatttgaagtgcaataaatataacaagcataccaattagtaaaatccaaaaaatattacgattcactttatagtaatagccaattaaagttattaataaaccaccaatgaatcctccaatatgcgccacaatatttatatttgacataaacagagaaacaccaactaatatcactaatgcaattaataactgtcctaacatttttttgttaaatgtttttgaaacatacatcatcgcaaaaattgatccaatcagaccaaatatagcaccactagccccaactgaaattgtagtcgtattaaatgatagtgatacaaagtttccaaacaaccctgcaataaagtatacagttaacatccgccatgaaccaataattgcttcgactattttaccaaaaataaataatgaaagcatattcataagtatatgttcaaaactaaaatgtaaaaacatcgatgtaacaattcgataccattcaccatgtacgacattaaaatgcactaacccgccaacatctaataattttacatccgaaaaattatttaaatataaaatcatacataaccatattaagacatttacaaatattattgtgtatgttgccggtgaaaatttctgcatatatttatctaaaaagttatcggttaatactttgcgtttatagaacatatatgtctttttatcattatcttctgaaataagtctagccaaaaatatattcggcatatgctttatcaaatcttttgtgtgtcttataacattgaatttaattctaattggcgaaacttcatttaattgttcttctgaaaattccgattctgtaaaataataaaattcaaaactttgtggttcgaaagaaataaaatttgctatttcatctttgtgttcaagcactttcgctttgtcaaaacgtatttcttgggtagacttgatatgttgtttaaaaatgactacttgtttttttcttttatgggctaaccaaatttcttggtcatctttttccctactgacaatatcaaaattcaagtacctaatccaataatatattgttttccaaaattgtttgtctatgttcatttagtcctccactatgctgcttgatatataatcaatttatcgactggttgatcgaatgattccggttcaaatgatgttatttgaaaatcgtataataagcttattgtctttgtctgataattagctaaaaacctgtcgtaatagccaccaccatacccaattctatatccatcgtcttgaaatccaacaccaggaacaacaattaaatctaggttattcgttgtttcaccttttgaagttggatagtaaatccccttattatcgacatcaatatctttgagattaaatatctctttaaaagtcatttgatgatttaaataatccattttcggtacaaaaatacgtttatgatccattaaggcttgttcaataatagaaaaagtatctacttcatgattaaaagaaagaactagcgcaattgcgtttgcttctttgtattcttcagttgcaaaaaattgatttcttaaccatgtgtctgcttttcgcttttcagctttattaaaattcttcattttatgtaaaatgtattttctaatctcatttttagtcacattatcacccactttattcaattctattatatcgttaataacaatacatgtcattatgttgtcatgatgaattatgcgacaattctaaaatttattatttcaattgaaaatcttttatcatttcatacgtgtgcataattaaaaaggtgaaacctcttattttgagatttcaccttttttattgttaatttaaatttaattttaatgattattttgtttcacggtgtaaagtttgtttgttttcacgtgaacagaatttcttcatttcaacacgttctggattatttcttttgttcttagttgtaatgtagtttctgtcaccacattccgtacaagctaaagttacgtttacgcgcatggttattcctccttatcatttctaaatacgactttattattataccaacatctataatatttgcaaagttaaaattttacaaccatgcgctacacaatcgtcaggttaaattttatttgtctttgtctttatttttatcatctttacctaactgcttaaagtagtagttaattacatctctacctaagtctccacctgttaaccatggtggtggtacaggctgatttgtatatacaattgaaaacgctaattttggatcatcaattggcgcgtatcctatataagtagagttaactcttggctctccgttttggaacacttctgcggtacccgttttaccagcagtaggtactactgtatctttaaaactaacatatccagtaccatctttatcattaaatgccattttgaatccttcttgaatttgtttgatttccttttcagtattattaaccttgttcaagacagtgccattaattttcttcttgagtggaccaacctcatctttattagttgattcatgaatcgttaatccaatgtgtggctgtattctataaccatcattcgctatagttgaaacatattgtgataattgtaatggtgtataggtatcatattgaccaattgataaatctagataattacctggattatttgttaatggttcgatttgacctcttgtttcatttggtaaatctatccctgttttcacacctaagcctacttgatttaatcctcttcttagcttttgggcaggtgaacttatgtctgaaggtaaagccataccagaataataagggtctcccgctaattttaatgctgttttaaacatatatacgtttgatgaatgcatcaaagcttgcttatcattaatagttacatgcccgtttttattgaagtatgatcgttttgtcaaaccaccttggaaatgtaatggttcatcgaccattgtttctccaactttgatagctttattctgataaccggctaataatgttccaccttttacagaagatccaaccgcaaattgagaagtaaacgtaccaatgtcataatcagtcattttaccactcttattaatctgctttccggcaagcgcaagaatgtctccatttttaggattttgtacaaccatcattgcattatccatatctttggcaccttgactgcgaagcttcttaatttgtttatctaataatgcttctacttctttttgaagatctatatcgatcgttaatttcaaatcttgaccgcgagcgccaggatttaacacttctgaagatgtaactttaccagatttgtccgttgtgtatttcatttctttcttcttaccacgcaatacatcttcatattgatattctaggtaagattttccaacacgatcattgcgtgaatatcctttggataagtaatgttctgtcaattcttttggaataccttcagcaggtgtcgatacatctccgaatatacctcttaaagtatcgccatatggatattttctatcccaatccatagacgtgttaacacctggtaatttggaaagttgctgagaaactgctgcatactctttttcactgacatcttcattttttatcatttgtggatctaaaactgttcctgcattcatctctcgaaaaatagctaaaacttgtaaatctttagaagacaattcatctaattgtgattttccgattttcgataacagttgtttatcatattgatcttgtttaatacttccatctgctaacatagcttgttcttttgtcatcattgcttttgcttttttaggatgcaactgaatccagaaatctttcttatcacgttctgtaattttcttagtatccatcttgattagctttgataacttttcagccgtatccaacatttccgattgtgttgtttttcgacccctagtatatgtaatagccattttagaagcattatcaactaaaactttcccatttctgtctaaaatacgacctcttggcacagactcattcactgtaatgttttcatcattttttataatttgtttataatgtgagccttgtgcgatttgtaaataacctaaacgtagtactagtactgcaaaaataaatacaatcacaccaaatataaagttaattctcttgttaattgtattttgaacgatttcatcatttgatttttcttttagtctttttaacaaaactacctacctctattcaaagtctttcactttaaatcatatatgaatttagaaattatttctatctttttgacaaaaaaataacggtctcatttaagagaccgaacaagtaatcatactttattttgttgcattatataattcgtcaactttttcccagttaactacattccaaaatgcgccaatgtagtcagggcgtttgttttgatattttaggtaataagcgtgttcccatacgtctaaacctaaaataggtgttttaccctcagttaatggattatcttggtttggtgtagtcacaatttctaactggccattgtttacgactaaccaagcccaacctgaaccaaagcgtgcagctgctttgtcagcaaattcttttttaaattcttctaaagaaccccattgttctttaattttttctactacagtacctttttcttctgagtttggtgaaagtaactcccagaataatgaatggtttaaatgtccaccgccattattacgtacagcagtttggatgttagctggtacactgtctaaattagcaacaatttcttcaatagatttagattctaaatctgtaccttctactgcagcatttaatttcgtaacatacgtgttatgatgtctgtcatggtgaatttccatagtttctttgtcaaaatgtggttctaatgcatcaaatgcgtatggtaattttggtaattcaaaagccataaataatcatcctcctaaaatgtctgtaagtaaataataacaagcagtgactggttcaacaaagaatttgcttaaattctactacttattattttctctactcatttaatataactcaaatcaaaaataattaaacattttgtatataaaaagttaacagatttgccataaaatcatacgaacggagtatgaaatgaacctttatcttctataatttaaaaaatgagatttatgcatacatctgaccaaatgtgcataaatctcatttctttatattaatcttggcaagactcacatacaccataaacttcaagtttgtgtttgtgaatattaacaccaggtagtgataattttatctgatctattggacaataatctattacctttgtatctccacacttttcacagataaaatgatgatgatgatggtttgtacaagcgattctaaacttcatttcaccatcaagttctgtattttcaataattcctaaatctttaaataagtgcaggtttctatatattgtgtcgaatgaaattccaggataattttcatccataacttgttgtatatactttgcgtttatatacttatcttcttcgacaaaaatatctaacatatctttacgtttatctgtatattttaaaccgttctcttttaaaattttaatagcatcatttgtattcattgatattagctccctttttaaacttcattcgcattttctgataagccattgtaatcataagtaaaataacaagtagaactacaattacaccacccggagaaatgtccatatagaaagctaggactaagcctaatattactgataattcacctaaaaatacacttagtaatatcaattgcttaaaactttttgttattcgcatacttattgcaattggtaacgtgattaacgcacttactaacagtatccctacaacacgcattgaggcagaaataaccatcgctacaataacaataaataaaaattgaatccatttaggaatgccaatgactttactatattcctcatcaaatgacaatataaataattctttataaaacaatgtaataaacagaacaactatgatggcaatgacaataatcgttgttaaatcacttatattcactgcgcttattgagccaaatagcaatccaacaatttcttgattgaacccatcagctaatgaaatgaagattgcactcaaggcgataccagcactcattataattggaatagcaatttcttggtaagcagtgtatgacgttcttaatttttcaattagaagcgcacctactattgcgaataagattccaaaccacattggattaataaatactagtgttggcataatagtaagtaaaaacataccgaaagatataccacctaaagttacatgacttagagcatcagctataagtgatagtcgtctaacaacgataaaagcaccgattagaggcgcaataaaacctatcaagataccactaattaaagagtacctcataaaatcaaaattcaataatgcatctatcaattgtgacacgcctttccattttaaataaactcaaatctttattaattacaacattctcgattatgctgatgatcgacaaaacgtacaggatgtccataaatttttgaaatttcaacttcatcaagtgatttaaactcatcagttgtaccatggaaatgcaaatgcttatttaaacatgctacttcagtagcagtatctgctacaacaccgatatcatgagtaactaagataatggtgataccttcttgttttaattgatctaaagtattataaaattcacttacatgttttgcatcaataccattcgttggttcatcaagtactaatactgcaggttctgaaatcaatgctcgagcaatcattacacgttgttgttgaccacctgataattctgctatatttttatgaattaaatcacttatattcagtctttctagtactttaatcactttttcattatctttgctattaaatgtttggaaaagacgttttgtctttgttaatccgcttaaaacaacttctttaacacttgctgggaaacctgaattaaaggcatttgctttttgtgataaatagcttaatttaattgatgttttcttatttttaaaatcaataccttcaacaaaaatctcaccactttgtaaaggtaataaccctagaatcaacttcaataatgttgatttaccagcaccatttggtccaacaattgctaaaaattcacctttatttattttaatgtttatattttctaacacttttttatgatcatagtagtaattgacatttttcaattcaaagactggtgtcatcgtattctcacctcgcattcaactatacaactcctagtaacatatgtaaacagtaatgtttacgactcaaaattagacaaaataaagagatatgcccccttcaagttttatttatcgcatttcttgaagagagcattatcattttattgttgcataaccttattttttaattctgggtcaaattgctgttgttttaacatttcaatttcaagtttatatggcggttttttatttttcttatcttcaccaacataaggtgtttctaagattttcggaatatctttaaaactatcatgatgcacaatgtaatttaatgcatcaaaaccaatgtaaccgaagccaatattttcatgtcggtctttttgagcgccacggtcatttttagaatcattgacatgaacaactttgattctgtcgactccaatgattttatcaaattcatttaatacgccatcaaagtcctctttaacattatatccagcatcatgcgtatgacatgtatcaaaacatactgataaacgttcgttattatgaactccatcaataatacgtgctaactcttcaaatgagcgaccaatctctgtacctttacctgccatcgtttcaagcgcaatacgtacattattgtcattcgttaaaacttcatttaatccttcaataatcttattaattccggcatcaacaccagctccaacatgcgcacctggatgtaatacaatatctttagcccctatagcttgcgttctttcaatttcttgttgcaagaaatctacaccaagattaaacgtttctggtttggttgtatttgcaatattaatgatgtatggtgcatgaacaacaatattagataaaccatatttttccatcacttcatgacctttagttatatttaaatcttcaatacttttacggcgcgtgttttgaggtgcaccagtataaatcataaatgttgtttcaccatattcatgcgcttctatagcagaaccttctaacatctttttaccactcattgaaacatgtgatcctaataacataaaacacacctaaccttttttgttttgcttacgtttttgtctattttgctgcttactaaattgcttacgctcttgacgtttcattttttcaacttcttgtttaaatttcttcttataacctggtttaactttgtttttaattttacttcgaactttgttcttcacttgattagttaaatggtcatctttgcgcattcttgcttgacgctgattgtgcgctttaacttcttttaactcaccatctttaatatcaacagtattgaatacaaaaccgcgatcttctattaatgaaatattgtgttcttcatcaggactataaagcgtaattgctacacctttataattcccacgaccagttcgtccgactctatgcgtaaagaagtcaatatcatttggcacatcaaaattgatgacatgactaacaccttcaatatcaataccacgagatgctaaatcgctggcaataacgtattggaattctaaattacgtatacgtttcatttgttgtttacgttcacgtggcgttaagccaccatgaatcataccaactttaataccagcttcatttagtgaacgtgctaaatcatttgcattatctctactattacagaaaataatacataagtatggatttagtatatcaattaaatttaaagtcttttcaactttagctgcacctttagtaggtattaaatagaattcgatgttctttttattttgttttttactgtcgacagctacatattctggatgacttaaatatttatttaaaaatggttgtaactgttgtgggattgtagcactaaacaccgcaatatttgcattatcttccaatcttgcagcaatgtaatctacatcttcaattaatcctaagtcaatcataagatccgcttcatcaataactaaatatgatgctaagtgcacatgtaaatgtcccgttttagctaagtcattaattctagtaggggtgcctataatcaattgtggttgtgcattacaacgttgtctatctttctctatatctgtaccaccaataaaaactttaactgaaacaccagctttaaattggcttaaatggttcgctgcatcgtatagttgttgtgcaagttctcttgttggtgcaactacgattgcttgtggttcttttatttcactatcaattaactgcattaatggtaataaaaatgcatgagatttccctgtacccgtttgagattgaccaattaaatttgttctctttagtattcttggaataattcgattctgaatttcagttggtttttcaaaattaaggtctttcacagcgtcaattaaactagattctagattaaattgttcgaatggatgttttgccatgatttggcctccttatatgttcatctttactattataaagtataaatgtgctattttaaataaaaatattaaaacctcgaaatttcaaaatttagaaatcccgagattttagtttaaatatattgaaatggatctgtattaattgtagatgcttcaacatctaaatttattttttctgtattgaaccaattcattagtaacgcttttaaaccttctttcatcacatattcgctgtaatgattaatatcaattaaattcacaccatgaattttagcatctaaggcatcatgatgtttaatatcacctgtaacaaagacatctgcgccttgttggacagcttgatattcatatccaatacctgaaccaccaataattgcaatacgtttaattttctgattagactcaccaacaaaacggacacttgggatatttaatttagatttaatatcagctgcgaaatcttccaatgtcatttgattatccacttctgccataacgccaagtccataaagggatgtttgttttatctcaataaaatcaaataccggtgtttcatatggatggtattgtttaattaattgctcagcccttgacttttgatatgcatctatcataaattcaattttaacttcatctacatattcaattttatcaatttgtcctattgttggattagcttcaccaactggtttgaattgccctcttccttcactttcaaagaaacaatattcataattaccttcttgcgctaatccattttcactaagcttatctttaaatggtccaacattatccttaggtatatatgtttgaactttatagtatacatcttgttgattatttattattgaaatgttcttcaaacccatcgccttcgccaacatcatattgacaccatacggatttacatctaaatttgtatgcatcgctattaaattaatgtcatgttgaattagttttctaatgatcaaaccataaccattagcttttaatgatgttacgcctttaaagattagaggatgatgactaataatagtattataacctttttcgattgcttcatttactacttccaacgtacagtctaatgctgttaaaacaccagtaacttcaacatcttcatcacctattaacaatcctacattatcccaagattcagcagtactaaatggcacatgatgatctaacaatgtcattaaatcagctattttcattactataacaccctttcaattacagcaatttcgtcattaatttgagctaaacgttgatgatgttgttcagtattgagtttcgatttaatatgataaagtgcttctaactctctttgccatttttttataaaatattcatttttgttgttcagcaattttggtccgaatttcaattcatcagatgatagctctattaattctgtagaatattctgctacaacaatttcataaatatggcctttttcttccattattatttcatcaattatttcataattcaattgttgtaatgtttgtcttaaattttcagtttggatattactttgtaaaatcaaccttggatgttgacttaacttatcttgcccatcttttaaaattttagcaataagtggtccgcccataccacaaattgtgatattatcgattacgtcctcaggttgaataacacttaagccatcccctaaacgtacatcaattctatctactaattggtttgcagctacatttttcacagcagcttgaaaagggccttgaataacttctccagcaataccgcattcgcataaatggttttgaattgcatagattggcaaataagcatgatctgagccaatatccgcgattgtaccttgttttaaaaatcgacttaccgtcgttaatcggttatttaacgaaatcattttattctcctttatgaaaaaagaggttgaacattattcaatgtaccaacctcactcaagttaaatcttaatctaaaaataaataagcgcttattcatgtcttggtatcaatcattaaaattgatataaattaatccataaagtctttcaaacgtttactacgacttggatgtcttaattttctaagtgcttttgcttcaatttgtcgaatacgttcacgtgtaacaccgaaaactttaccaacttcttcaagtgttcttgttctgccgtcatcaagaccaaatcttaatcgtaatacattttcttctctatcagttaatgtatcaagcacatcttctaattgctcttttaataattcataagcagcatgatctgaaggactttgtgcttcctgatcctcaataaagtctcctaaatgactatcatcttcttcaccaattggtgtttctaatgaaacaggttcttgcgcaatttttaaaatttcacgaactttttctgctggtaaatccatttcttcaccaatttcttctggtgctggatctcgacctaagtcctgtaataattgacgttgaacacgaattaatttattaattgtttctaccatatgcacagggatacgaatcgtacgtgcttggtcagcaattgcacgagtgattgcttgtctaatccaccatgttgcatatgttgaaaacttaaatcctttgttaaagtcaaatttttcaacagctttaataagacccatattaccttcttggattaaatcaaggaataacataccacgacctacgtatcttttagcaatacttacaactaaacgtaagttcgcttctgcaagtcttgattttgctacttcatcaccttgttcaatacgtttggctaattcgatttcttcttgtgcacttaataagttaacacgcccaatttctttaaggtacatacgaactgggtcatttattttaacacctggaggggcactaagatcacttggattcagtttctcgtcagtatctgaactatctttttcattaactagtgaaatatcattatcatttaattgatcaaagaaatcatccatttgatcagagtcgatatcaaaattctgaagtttttcagcaatttcttcatgacttaaatgaccctcttttttacctttttcaattaattgcttcttaacatcttctaatgttaatgtcggatcaattgtttgttttttaattttaactgtgttatcagacatgaaacggcctcccgattttaaatatgaacattcgaaatttattcaatattgctattttaaactaaattcttaattaattcatccatatttttaattttattttacaaattggaactaatcccaatatttatttttcaatagtgttgtttaaatgcggtaactatcatttacccttatacattttgacataatcattattcgtattattatttaaaatcacatgctacatgcgttctttattcttagcaacaatttgctgtaaatagtatttttgtaattctacatcgccaatccttgtagcttcccttaatttatgattcaatgactcaattgtttcttgtcctttttcattaataacattgacataatcatcaatttcattttcatatggttcgtcattcaaattatattgttctaagctaattagtgtttctctcaactcatttgaattaacatactgcacagcatcactgatattatattgatcattttccgcataaaaatcatgtaagacttcgaatacatatttaaaatgctgatttgtgaagttatccttatcaacactttcataataatttaaaaatgtatctttatctctcattaaatgttttaaaaatgctcgctccgctttttcttgacggctcaaattgtcaaattgtgccataccaattggctcaggttcaatgtaaccgccatactcatcttctggataataattggctggtgcttgattgaattgtatttcgttagctaattgctcaggactaacattgaaaaatggtgcaacatcatttaaagccttttgttgcaaaatcgatgatttcataagcgaaatatcatgacttagttctttcaaataacgttcatatgaaaggtcattatgtgcaatttcatcttttaatatactcactttataatgtgcaaatgactttttgtcattttttacaaaagcagtaaatgcatcgttgccatacttaccaatgtattcatccggatccatgcctgatggcaattgtataacaaatacatttagcccttgctgtaacaaattttgacctgttttaagtgttgcttcactacccgcaaaatccccatcaaacattaatgttatatttgatgttaactttcgtataaaagtaatatgttcatctgacaactgtgtacccattgttgcaacaacgtttttcaagccagcagtatcagattttataacatccataaaaccttctagtaatacgatttcatctaattttctaattgatttacgcgctttatctaagttgtataacaactttcttttttgaaagataggtgtttcaggactatttaagtattttggttcttgaccggtatatgttcgacctgaatatccaacaattcttccttgcgcatttttcaaaggaaacataatacgatttcgaaatctatcgtaataactgaaattttcttcgttacgtgataataatccggcttcatatgctaattcaatatcgtaaccctttttttgaagaaaatcatgacaaaaatgtgagctatcgggtgcaaagccaatgcctcgctctttaataagcgcatctgtaaaaccacgttcttgtaagtacgttaatgcttgttcgccttcgactgtctttgttaaagcgtaataataaaattcttgtattaactcatgcatttcaatcatttgtaaatcatcagaagcaatttgaacatttgagttagattgtgttgcctcaatatctacagcaacattaactctatcacctaattctttaaccgcttcaacaaatgatatgtctttaatttcttgagtaaattgaaaaacattgccaccttttttacaaccaaaacaatgacaaatttgtttatcttcagaaactgtaaatgaaggtgtcttttcatcatgaaaaggacacaaacctatataattgcgtcctctcttttctaattttacatattcacttaccaagtctaaaatgtcggttttatcttttatttcattaatgatcgattgatctattcgcaaattaaatcacctattaagcattagttatactattatacctaattttcgacaaaaatgaaatcatttcgatttattttgttcaatataatggattatatcgtttgctgtttcttcgattgctttttgagaaacatcaatgacaggacatccaatttcacttacgatttcttcaaagtaattcaattcttcttgaattcgtgcttctgttgcatatcgagctgtgtcacctagtcctaattgttttagtcgctcttttctaatgcgatttaatttttcttcacttattttaagtgcgatacatttctttggattaatatcatataagccatctggcggtgtcacttctggtacaatcggtacattcataactttgtaactcttatgcgctaaatactgagataatggtgtctttgaagttctcgaaataccaagtaaaacaatatcagctttaggtaatcctttaggatctttaccatcatcatatttaactgcaaactctatcgcatcaattttcttgaaatatgcatcatctaatctatgaacgatacctggctcattataaggtttttcttcaaccgaagcagataataaatccattaatggccccatgatatcgacagacttcaattggaattctgctactttctcactcatatattgcttcatttcaggtttaataagtgtataaacaatgatagcatttgtatcttttgcaacttgaatcacttcatcaacatcttcaaaagattcaatatatggatatcttaataattcatttttacattgcttaggattgaattgtgaaatacctgccctagcaactaactctgccgtttcacctatagaatctgaagctacgataattttaattttttccattacttctcacctattctttatataatgctactaataacttagctattgttgttttggaaattcttccaattacttcatacttttgattatctttttttcttacaattggaatcgaatcaatttctttttcaatcattctatctgctgcgtatatgactaattcgctttcctctaaataagtgacattaggcatacgtgtcatatttacactgataggtactttatgaatatctgctccaatcattgaagctcttaataaatcttttcttgaacacacaccaacaaaatcgttatcttcattaataataaataatgtacttacatcttctaaaaaaattgtacaaatagcgtcataaactgttgtattctctcttagcacaacaggttgagacatatagtccttaacctcaaattgtcgaagtttttcattaaaaaatttgccttttgatttacctgaataataatatccaactcggggacgcgcttctaaaaaacctgacattgttaatatcgctaaatctggtctaagcgttgctcttgttaaattcaacttatctgctatttgttcaccagtaatgggtcctttagttttaacaatttcgatgattcgttcttgtctttgactgagttctataggtcttcaccccttttttattcacctattattataccgatatttctttcatgtcacaaacacattaattttacttgcctttaaataatctatcaattagaataaacgtacagcgagttaaggatagtgtaagcttaacaataagattggcgcaacgaatcattttaaaataaaagcgagtgactacactaatttgggtggaaccgcgggttaaatacgtaacttattttgtattatatacaatttaaaatattaactcgtcccatggaagtaaagcatatttactatgctgttattttccatggggcgttttcatgtatgaggagaggtaattatggcaaaagatatggatacaattgtttcattagcaaaacacagaggttttgtgttccctggtagtgatatttacggtggtttatcaaacacatgggattatggtcctttaggtgttgaattaaagaataatgttaaaaaagcttggtggcaaaaattcattacacaatcaccgtttaacgttggtatcgatgctgcaatcttaatgaatccaaaagtatgggaagcttcaggacacttaaacaacttcaacgacccaatgattgataataaagatagtaaaattcgatatcgcgctgataaattaattgaagattatatgcaagatgttaaaggtgatgaaaacttcattgccgatggtttaagttttgaacaaatgaaaaaaattattgacgatgaaggtattgtttgtcctgtaagtaaaactgctaactggactgaaattcgccaattcaatttaatgtttaaaacattccaaggtgtaactgaagattctacaaatgaaattttcttacgtcctgaaacagcacaaggtatttttgtaaactataaaaacgtgcaacgttcaatgcgtaaaaaattaccatttggtatcggtcaaattggtaaatcattccgtaatgaaatcactccaggtaacttcattttcagaacaagagaatttgaacaaatggaacttgaattcttctgtaaacctggagaagaaatcgaatggcaaaattattggaaaacttttgcaagtgactggttaacaagcttaaatatgagcagtgaaaatatgcgtttacgtgatcatgatgaagatgaattatctcattactcaaatgcaacaactgatattgaatataaattcccatttggttggggtgagttatggggtatcgcaagtcgtacagacttcgacttacgtaaacatgctgaacactctggtgaagatttcagataccatgatccagaaacgaacgaaaaatatattccatattgtatcgagccatcacttggtgcagatcgtgtaacattagctttcttatgtgatgcatatgatgaagaaggcgttgaaggtagtaaagatgcacgtacagttttacacttccatcctgcattagcaccatataaagcagcgattttacctttaagtaagaaattatctggcgaagcgattaagatttttgagcaattaagttctaaattctcaatcgatttcgatgaatcacaatctatcggtaaaagataccgtcgtcaagatgaaatcggtacaccttattgtgtaacattcgactttgattcattagaagataatcaagttacagtacgtgacagagattcaatggaacaagttcgtatgccaatctcagagttagaagctttcttaactgaaaaaacaaaattctaattaaaaagactttccaccatatgtggtggctatataatttataaaaagagatactggttagtaaaattgccagtatctcttttctattcaaaaaggtattcaaataaacacatctatgtggctacttgaataccttttattattttatgttattgttccaatctttttaattggttgattagtttctgacttttaaaaaacatacctgcatattcacgatataacattaaaatgatatctgacatttcatcaataatttcttgatggatattcaatgaattcattttatctatcggtaatttttgtaatacatctaataaatatagtgttttattcgataatataactgcatgtacatctttagaagcctcttgccttgaaatcgcaccgtcaaacttaaaactataacctattaaatctgcttgtgtgtcattaccactcacagcacagcgattaaatgatgcagtaaaaccaaatcgtttcatgcactttaacataactacgactgacattaactgtgcagatgtacctgattctattttttcaagaacaaattgtaataattgatagttatatggtgcaatgtcaccttcatccattgagcgctcaatagtttcagctgccagagcggcataactgcttacgtaaaggtccatttgtaatttataatgttgactaataacatctacagaatttaacgttcccatacctcgccactgattgtaaataaacaaaccataaacaaacaattgcgtttgcgcttgtaaacccgtcttaacttttttagcacgccttgccataagtggtacttttgcaccatgctcatttaaaatcgtgataattttatcagattcaccataatcaactgctttgatgataatccctttttggcgcattaacaattatcttcaccacttttaagattaatcttggtcttcaacataaccaatttggcgaataaagttaactttgtttcgccagtctctttgaactttgacccataattctaagtaaactttagagcctagaagcatttctatatcacgtctcgcacgttttcctacttcttttaactttttaccgccttttccaatgacaattcctttttgcgaatctctttcaacatatatagttgcttcgatatgaacacgatcttcgctttctttaaccatacggtccacattaacaccaatcgcatgagggatttcttcacttgtaagatgaaggattttttcacgaatgatttcacccactacaaattgttcaggatggtctgaaatttgatcatctggataatatttaggtccttcgggtaaatacgtctttaaaacatcaataaaatgatcgacatttagcccttctaatgctgaaataggtacaatctctgtaaagtccatataactttgatattcttcaatctttggcattaattcatctggatgcactaaatctattttatttaatactaaaaatactggtgtcttaacatttttcaacatttctataatatattcatcgcctcgtccaatttcctcattggcattaaccataaacatgattgcatctatctcagataatgtatttttagcgactttcatcatatagtcacctaatttgtgtttaggtttatgaatacctggcgtatcaatgaatataatttgcgcgtcatctcttgtcataacaccttgaattttatttctagttgtttgagctttatcggacatgattgctattttatggccgatcactctattaacaaatgttgactttcctacatttggtctacctataattgaaacaaatcctgatttatgttctgtcatttattctaaatcctttcctgaaaatccaaatggtagtaactctgcgactgtcatcataaccatatctcctttatgatttgtcatatacacaggcatatcatcatcacataattccttcaaaacttgacgacatgcaccacaaggtgatgacggtttatctgcatctacggttacagttattgattcaaaatcacctggtctgtatccttgagaaattgccgataccaaactagctcgttcagcacatatcgataatggataagaagcattttctacattggtaccataaaaagttctaccgtctttcgtttttaaataagcccctactttaaattgactgtatggcgaatatgattcttgttgtgcttttctaacttcttgaaaataatgaggttgataactcatatatgcctccctaaaataacgctataaaatgtggtaaaaatactattaaacctataataaatgctaatattgaaactataagtacactaaaagccgcaatatctttagcgtatttagctaaatcatgatattcaacggtcactaaatcgacaacatattcaatagcagtgtttaaagcttcaacagtgagaactaatgcaatagcaatgagtataaatatccactcaatccgattaatatttagtacgagaccaaagacaatagcaacaatcattgcaaacacatgtaaaagaaatttatagtctttttgaattaagattttcagcccatcaagtgcatatttaaaccttttcataattagtctcgtgttaatccatatgcgtttaatattgtatcttgtcgaccaaacatttccttttcatccgcttcagtcatatgatcataacctaatagatgcaaaaatccatgtaatgctaaaaatcctaattctcgttcaaaagaatgtccgtaattgtttgcttgttcttgcgctacatccgtacagataattatatcccctaaaacacgtggtatatcaagaccactaaaatcaatctctggctcatcttcttctaaagcaaatgagattacatctgtaactttatctttatctctatatgttcgattaatttcttgtatttcttgtttatctacaaatgtaacagaaagctcagcatcgtcttctatatgctcttcttttttagcaaattctaataaatcttcaatttgtttataccaagcatctttaactaagcctgtgtgatcgctaaaatctatcgtaaacatttaattctctccttcataatgttcaatgatcttacttaccaatggatgtctgactacatcgctctgatctaatttcaatatacttatacctttaacgttgtgtaacctactgaccgcttccttaagtccacttttaacacctttaggtaaatcgatttgagtttggtcaccagtaactaccatttttgagccaaaacctagtcttgttaaaaacattttcatttgcgcatgtgtcgtattctgcgcctcatcaagaattacaaatgcatcttctaatgttcgtccgcgcatatatgcaagtggcgctatttcgataatgcctctttcaataaatcgctctgtttgttcacgcccaagaacagtatatagaccatcatataaaggtcttaaatatggatctaccttttctttcaaatctcctggtaaaaatccaagtgactctcctgcttcaacagcaggtcttgttaatacaatacgtttaacagcacctttacggagttgctttgctgcataaactacagctaagaatgtcttacctgtaccagcaggacctataccaaatactaaatcattatttttcatggcattaacatatatacgttgccccatcgttttcgcacgaatcgtcttaccaaatgcatctttagttatctcttcatcatataaatctaacagatgttgaattgtgttattatgcgccattttaatagctgcttcaacatctttaattgtaatattattacctaaatcaataaccttcagcaaattgattaatactgattccgctttttctacgttttctatttttgtacctttaacggcaacttcttgtcctcttgcatggatgacaacatcgaaactctcttcaattgcttttaaatgttcatcattatttccaattaaagcttgagattggttcatatcgtctatttgtataattccaggcatacacgcgctccttttcatatatcatttatattcattctatgatgctttaatatctacttaattatatcatgcaattgattgatttaaacatctttgcattgacttactcatttttctttaatttaaaataatcatttatacttttcaccttgtcataaaagcagattcaattttagactaatcaattttttgctgtaatttaaataactaatatttctcgaaaaattctctttgttttttaatttttcttaacgtaaaaaaacaagcaactaccattacgatagtgcttgttttcaaaaaattttataattgttttggtttagctaaaatttctgaccatatcataccattgattacttcatctttatcaaattggaacgctgatttagtcaaatctttttcgacattttgagaattaagcagctgctttaatttcaaacgttttgtacgttcagataagtatttatcctcaataatatctctagcacgtttttccattttagcaatttgcttttctttttctctatcaatgtcagtacgaatcgttttaatatcatctctaagtgatttttctaattgacgtctaatttcgtcagaattatcttgtctagaaggtctatgtttctgctccaccggttctgctttaggcactgtgattggtttctctgtcatcggttttgtttcttgttgttttttaggtgccataggttctacaacaggtttcgatttaggctcttcctttggaagttcatcgaataaaggtggtaacgtatcatcatattttcgtttcgatgatttcttttcttcttcatttaattcttcacttatttctttaaacgttcgctcaatttcttcaaaaaagccacctttttttggttcattatcggtagatgttttttgaggtggcttttgattttgtctatctttatgactattttcgcgcatagtagtaatgatagaaatgatcactgatatgacaaaaattagaataccgacactcatttaatcacctctcgacttaatgttcaggtgactcatcatcactttgatcagttcgtttattaattgcatttctcatgcctgtatcagcttcgatatttttcaaattataataatctttaacactgatattacctgaacgtaatgcttcagccatagctaatggtacttcagattcggcttcaactactttagcatgcatttcttgtacacgcgctttcatttcttgctcagttgctacagccatagctctacgttcttcagcttttgcttgtgcaatatttttgtctgctaatgcttgttcagtttgtaagtctgcaccaatatttttactaatatcaacgtcagcaatatcaattgataaaatttcaaatgcagtacctgaatctaaacctttgcttaaaactgttttagaaatattatctgggttttcaagtacttctgtatgatgcttactagaaccaattgttgaaacgataccttcaccaacacgtgcgatgattgtttcttcaccagcaccaccaacaagtcgagcaatattagctctaactgtgatacgagctttggctttcacttcaataccgttcattgctacacctgcgataaatggtgtttcaatgactttaggattaacagacatttgaaccgcttctaatacgtcacgtcctgcaaggtcaattgcagcagcacgttcgaaaggaagatcaatgtcagcacgttgtgcagcaatattagcgtcaacaactctgtcaacatttcctcctgctagataatgcgattctaattggtttgttgttaatgctagtcctgctttgtgcgctttaattaatggcgctataacttttcttggagatacacgacgtaaacgcataccaaccaatgtacctataccaacatgaacgccagctgctaacgctgaaatccataaaccaatgggtacaaatgagaataaaataagtaatgcaactactataataactgctattacgataaaacttaaactaaacatggtatcgctccttttaattaatctacttccctcacaactactcttgttccttcaacttcaaggatttttaccgttttattgcgcaaaataaagttgccatctgaaacagcatcaatacgttcattttcacaaaaaataatccctgcaggtcgaagatctgtaactgtttgagcagtctttcctacgaggtgcgagcggttatcatgagaattgtaacctgactcagaattagttgaatcttttaagataactttatccaaaaacggaatctttctgttgaaaatcttcactaatatcacccattctacaatcgttaaaatcaaggcaacgataacattcgcaagcataaatagcaaattatcaccgagcgttgttatgcttatagttatcagtatcatgccaataataccaattactgcaccaactacaaataattcaattacaactaatataacgccaattgagaatattaagatagaatgcatattgacatttccttggattagaaatcccaaaaataaaataagtaatgataatgtggcgataataccagctgcattgatttttttagagtaaagttgatatacaaatcctaagaatgtcaaacaggttaatattaacgtaaaaataggttgaacaattatattgctaacttgttcaacccaagtatctccagccgttgattccaagatagttgtcatttgtaaaaaattattataactcacaatttcacctcgccctcacattaattatacatgaaattgaatatactttatagttataagaacctatagaatatcaatttgattatttataaactatataactttttttaattaaaaattgacaacaaaaaaacatcacatattagtgtcagacactaacttgtgatgtttgttttatataattaatattcgtgttgagggagtcaacagaggtattaattatttgaatttacgtttacgtgcagcttctgatttctttttacgttttacgcttggtttttcgtaaaattcacgtttacgtacttcttggattgttccacttttagaaactgaacgtttaaatctacgtaacgcatcttcaagtgattcatttttacgtactactgttttagacatctgtatttccctccctccaaatatcaacggaactttatagtcaattgcacagtaaaactatgcatttataagtataatatatctgtaatttatggtcaattagtaaattgttttttatttgaaacatatttcacatcaaaatcacaaagacttttagattttgttctaaaaatctcttaataatttatttaatgagaagagttgcttatatagtaaattgtgaagccgttaaaacaacgttacaaaacctatatctttaatacggaaccatatggtatgaatcaaggaatacttaaactaaaacttctctatcagatttatttgttgcgaaatcaacaactttaattgcttgcccttcatttaatggataatttgcttgcgtaattttaacttttacaatttgacctatgagtgattcgtcaccttcaaattgtactttcatataattatctgcatatccaactaatgtaccttctgtgtcaccctgttcctcaggaattacttcaagcacatcttgatcaaatttagacgcatataactttccgagttgattgcttagcgtaattaacttatgcacccgttcatttttaatttcttcatcaatttggtcatccattcttgcagctggcgtgccaattctaggagaataagggaaaacatgcagttcagagaacttatgctttacgataaaatcatatgtttcttggaactcagcttcagtttcacctgggaaaccaacaattacatcactcgtaactgccaagtctggtaaagctttatgcaattttgttaatcgttctgaaaatctatccattgtatacttacgtctcatacgttttaatactgtatctgaaccagattgtaatggaatatgcaaatgacgcacaacttttgttgaacgttctaaaacgtcaattacttcatctgtaagttgacttgcttcaattgaagaaattcgaattcgttctaatccattaatcgtttcaagatcacgtaataattgggccaagttataatcttttaaatcttgaccatatccacctgtatgaattcccgtcaatacaatttccttatatcctgaattcactagttgcgtcgcttgttcaactactttttccggatctcttgaacgcattaagccacgagcccatggaataatacagaatgtgcagaagttgttacaaccttcttgaatttttaatgacgcacgtgttctatctgtaaaataagggacatctaattcttcatatttacgatttttcatgatatttccaacaccattaattggttggcgttctttacggaattcgtcaatgtaacctaatagtttatgtctatcttgtgtaccaactactacatcgacaccaggaatttccataatttcagctgatgaagtttgcgcataacaacctgttacacagattacagcatcaggattttgtcttattgcacgtctaattatttgacgactttttttatcacccgtattcgttactgtacaagtattaataacaaatacatcagcattcgcttcaaagtcaacgcgctcatagtttgcttctttaaataattgccagattgcttcagtttcataatggtttactttacaacctaatgtgtgaaacgcaactgttgacataaatattcaccccattaattctttttcataacttattgcacttaacgcatacaatggcgcagtttctgcccgtaaaattctcggcccaagaccaacaactgtactagtattactaaataatgaaatttcattttctgacaaaccaccctcaggaccaaaaatcatcaacactttatcctgagcattgaattgttgtaaagtttgcttgaaattgcttaactcaccatcttttgcttcctcttcatatgcaataagaatatagtcataattatcaatagtatcacaaattaattttaaattcgactcgaattgaatagatggaatcactaaacgatagctttgttcagcagcttctttaattattttttgccaacgctctatctttttggcaacttttgcctcgtttaatttaacaattgaacgttccatgctcacagctataaatgatgaagcacccaattcagtagctttttgtagcaaccactcatatttgtcagctttgattagtccactgcaaatcgtaacatcaactggcaattctgtattaatattttgtttttcttttaaatcaacttcaattttatcacttgttatgtcagcaatttcacataaataaactgtttgatcattaaaagttaaaataattttactaccaacatcatatctcattacatttgttatatgatgaatatcttctttttttgtaataaaaaaacgctgacttacatcagcgttttggtctatgaaataacgttgcacattattcactcactttctggccaacaagacaaacccaaccgttgtcatgttgttctgaaataattttaaaacctacacgctccatatgtgactgtataccttcatacttctcttttataataccagaagtaataaaataaccgccttcatttagagtattataagcatcttcaatcatttcatcaataatatgcgctaaaatatttgctattacaatatcaaatttttctgtttcgtctttcaataagttacctggaacagcttcaattaacgtttcacaatgatttcttctgaagttttctttagctacactcactgccatttcatcaatatccaacgctttaatacgttttacaccgattagatgacttgcaatacttaatatacctgagccagtaccaacatcaattactgaatgctgtggcaatacatatgtttctattgccttcaaacacatacttgtagtcggatgatcacctgttccaaaagccatacctgggtcgagctcaatgcaaagctcttcatccgcttctttagcatatgtttcccaactaggaactattgtgaacttcttcgacgctcggaatggatggaaatagtttttccattcattttcccaatccgtctctgcaataatttgctcactgaattgaacgttatgttgatcaagttcatctaaatttaataactcatctttaatttgctgtcgcaacttatcatcataagtcatttcattaaaataggctttcaatcttactcccttatctggataatcctcttttttcaaagcgtaaatttcaccgtatttatcttctggttggttaattaaatcatctgaatcttctatcacgacaccatttgatccatgattttcaagtatattggtagccaattctactgcttcatgattaataataattgaaagctctgtccagttcatactttattctcccttaaagaatctttttgctctatctttaaaattcgaaggttgttcattaatttcttcaccatttaattgggcaaattctttcattagttctttttgtctatctgttaatttagtaggcgttactactttaatatcaacatataaatctccgtatccatagccatgaacattttttatacccttttcttttaagcggaattgcttacctgtttgtgtaccagcagggattgttaacataacttcattatttaatgttggtatttttatttcatcgcctaaagctgcttgtgggaagctaacatttaatttgtaataaatatcatcaccatcacgtttaaatgtttcagatggtttaactctaaatactacgtataaatcaccagcaggtcctccattcacgcctggagagccttcaccagctaatctaatttgttgttcattgtcgacaccttcaggtactttcacttctaatttaactgttttattttcagtaccttttccgtgacatgttggacaagcttcttcaaattcttgaccacttccattacatttaggacaaacttgttcagtacgaactctacctaaaattgtgttttgttctacagctacatgaccagcgccattacagtaactacaagtctttttacttgttccaggctttgcaccatcaccatgacatgtttcgcatgttacatctttacggattgaaatttcttttgttgtaccaaataccgcttcttcaaatgttaatgtcattgtatactgaagatcatcacctttttgcggtgcatttggatctctttgtctgccgccaccgaagaaagagctaaagatatcttcaaaaccgccgccaccgaagccactaaaaccgccaaagtcagagccattgaatccttgtccaccaaaaccttgtggaccatcatgtccaaattgatcatagcttgcgcgtttattatcatcacttaaaacttcataggcttcagaaatttctttaaacttttcatctgcaccttcttctttgttaatatctggatgatattttttcgaaagctttcgatacgcttttttgatttcatcttttgaagcatccttactaatgcctaaaacttcataataatctcttttggccacagctatctctccttttcttaattaactcatatagtttaacgtaatatgtcatactatccaaataaaaagccaaagccaatgttctattgactttgacttttcagatcatgacaacattctaattgtattgtttaattattttttgtcgtcgtcttttacttctttaaattcagcatcttctacagtactatcattgttttgaccagcattagcaccttgtgcttgttgttgctgttgagccgcttgctcatatacttttgctgataattcttgaatcactttttcaagttcttcttttttagatttaatatcttctatatcttgaccttctaaagcagttttaagagcgtcttttttctcttcagcagattttttatcttcttcaccgatattttcgcctaaatcagttaaagttttttcaacttggaatactagactgtcagcttcgtttcttaagtctacttcttcacgacgttttttatctgcttcagcgttaacttcagcatcttttaccatacggtcgatttcttcgtctgataatgaagaacttgattgaattgtaattctttgttctttatttgtacctaagtcttttgcagttacatttacaataccgtttttatcgatatcaaacgttacttcaatttgaggtttaccacgttcagctggtggaatatcagtcaattggaatctaccaagtgttttattatccgcagccattggacgttcaccttgtaatacgtgtacatctactgatggttgattatctactgctgttgaatagatttgagatttagatgtaggaatcgtagtgttacgttcaattaacgtattcatacgtccacctaaaatttcaatacctaaagatagtggtgttacgtctaataatactacgtctttaacgtcacctgtgataacgccaccttggattgcagctcccattgccactacttcgtccgggtttactcctttgttaggctctttaccgatttcttttttgacagcttcttgtactgctggaatacgagttgatccaccaactaagataacttcatcgatatctgagtttgttaagccagcgtctttcattgcttggcgtgtaggttccattgttcttctaattaatgaatctgataattcttcaaatttagaacgagttaagtttacttctaagtgtaatggaccgttttcaccagctgagataaatggtaatgagatttgagtttgtgatacacctgataagtcttttttagctttttcagcagcatctttcaaacgttgtaatgccattttatcttgagataagtctacgccattttcttttttgaattctgcaactaggtagtcaataattacttggtcaaaatcatcaccgccaagtttgttgtcaccggctgttgatagtacttcgaatacaccgtcacctaattctaggatagatacgtcaaatgtaccgccacctaagtcaaaaacaagaactttttcatctttatcagttttgtctaaaccatatgctaatgctgcagctgttggttcattaatgatacgctcaacttctaaaccagcaattttaccagcatctttagttgcttgacgttcagcatcgttaaagtatgcaggtactgtaattacagctttgtcaactttctcacctaaatagctttcagctgtattttttaagttttgtaaaatcatagctgagatttcttgtggtgtgtatgatttaccttcaatatctactttataatcagtacccatatgacgtttaatagattgaacagtgtttgggtttgtaatagcttgacgttttgctacttcaccaacttgagtttctccatttttgaaagctacaacagatggtgttgtacgtgaaccttcagggttttgaattacttttggctcatcgccttctaatactgttacacatgaatttgttgtacctaagtctataccaataattttactcataataaaattcctccatttaatcattaaattaatttaattttaaacaatgtcttttcgccaaatttaagttattggtttactttgaccattgatggtcttaatactctatctttaagcttgtatcctttttgtagttcttgagtgatttcgccagattcaaaatcagggttatcatcttgaactacagcttggtgaatatttggatcaaatgcttcaccttcagttttaataacttcaagaccattatcttttagtgcgttaatcaaactttcatgcaccatttgtacacctttttgaagagatttaaaagtctcatcatcaccttcaatttgaagtgcacgttctatattgtctattgctggtaaaatatctgttaacacacgttgtgcttgatatgttttgtttatttcattttctttttgaattctacgcttataattttcaaactcagcgtagagccttaaatatttctcttcgttttcatctgctaattgttgaagttcattaattttttgatcttttggatctatttcttcaataacattctcgtcagacgtttcttctattgcttcatcttgtaaatgacctttactttcttcagcttgttcaactgaatcatcaatattttgtttgacgtttgtttcttcaactgttgattcagtgtttttttcaactgattcgtctttatttgtcattttctgtcctccaatactttctaatccatcattaccaaattctatttaataattgaatgacattttgataatgcatagctgtaggtccaatcacagcgatttgaccttttaacgtttcatcaaaatgatattgacttgttacaattgaaatatcacttaagctgtcatcaatttcattaccaatttttacattaatatttggtgaagatatatcttgtaataattctgcaattctatttgattctatatattgtagaatgggctgaattgaagatacattactttcattcaatgcatcaataagtttaacctttccacccatataaatgctattactttgattagaaatatgattattcatcgtatttaacaatttattgataaaaatttcttcctgctctgattgaacaaaagagacaatatcatcttgtaaattctgattaaactcagttagtttgtttgtaacaaaatttgatattgtatttagtttgtcattattaaacggtatgtctgaagcaagatgtacatgctcaacatgacctgatgaaaatacgataaccattataactaaattaggattagcacgaatcaagtgtacattattgataatatcttgtttatgattaggatgaacaactaaagttgtatattgagatatatttgataattcatctgcaaaatatgtcaatgctgatgatacatcatattgattctcaactaacaattgatttaatcgtcttaatttatttgttttttgatgagatgtttgttcaagtaaacgattgacataatacctaaaacctaattgtgatggcgaacgccctgaagaactatgtgtcttctcgatatagtttaaatcttcaagctgtttcatctcatttctaattgtagcaggactaacattcaagttatgtcgctcaattagtgttttagaaccaacgggttgtccaaaatcaacataatcctcaacaattgcgtttaatatactcaattgcctatctgtaatcatgttttcacctcattagcactcacttatctcaagtgctaattataatttatcaaattggtcaaagtaagtcaatgttaaagactcgaaatttcaattttttttaatcatttattaggaaagcttcaaaaacctcattacctatgactttccctctatttgtaagtgcaatcacatcgttcttttctacaattaattccttctcttttaaattatttattgtttgaccaaagacactttcaatagattggtcaaacttctttttgaacctactactactcacaccttcatttaaacgcaacccaagaaacatttcttcttccattctctcagtcaaagaaggtttatttgatactaaaattgctttactttctttatttatagctttgatataatgattcactggattgatattcgtataacgcacaccatctacataaccacttgcacctgctccaaatccataatattcctcattaaaccagtaaaccttattatgttctgattcatggccatctaatgcaaaattagatatttcgtattgatggaaaggagattgttctatcttagacatcagcaactgatacatgtcagcacctaaatcctcattaggaagtttgagcaagccttttctatacatattataaaattgggttttaggttcaagtattaagccgtaactcgaaatatgttgaatatccatatctaaagctagatctaaactttgttcaaaatcttcaatcgtctgtttcggtaaatgatacattaaatctaaactgattgatttaatacctgcgtttttagcatttaacaccgaagtgtaaatatcttcagtattgtgcgttctacctaaaacagacaataactccggcttgaatgtttgaacgcccattgaaatcctttttactccatatttctctaatagttggactttctctttagttaactcatcaggatttgcttcaaatgtatactcgcctgtgattgtaaacgtatcacgtattgctttaagtaatctttccaactgattaatagaaagggccgttggtgtgccgccacctacatacatggtctttaagatcctatattttgctgtagacatttctgtgattagtgcatctaagtactcatctacaggttgattctgtataaaatatttattgaaatcacaatatgtacatattcttacacaaaatggaatatgtatatatgcactttgtaccgtcattttaatgccccgcttctcagactttttatccaatcggctatatcctgttggactatctgcaattattcttacttttaactttaacgtttaatcaatgattgtctaatatatcgattcattttaatatttattcttgtttagagggagtgagatagaaataataaagaaccactaatgatttattatgtagtggctcttacacattagccagatgtaatatgtccttaaaaataaaattacatgagtaaaactcatgcataagggagtgggacagaaatgatattttcgcaaaatttatttcgtcgtcccaccccaacttgcattgcctgtagaatttcttttcgaaattctctatgttggggccccaccccaacttgcacattatagtaagctgacttttcgtcagcttctgtgttggggccccattgttataagctcattttaactctgtcgatggctgccaatataacattgtaaagcccaggacgttaatttatcctaggctccctctttttagttattaaactttattcattgtaaattgttaattgattttttaaaattattcatcatccattttcaatacagccaagaaagcatcttgtggaatttcaacattaccaactgctttcatcttagctttacctgctttttgtttttcaagtaatttacgtttacggcttatgtcaccgccataacatttagctaaaacgtttttacccattgatttaatatttgtacgcgctacaattttttgtcctattgcagcctgtacaggtacttcaaattgctgtcttggaattaacgttttaagtttttcaactaatgctttaccacgttcatatgcaaaatctctatgaactatgaagcttagcgcatccactttatcaccatttaataaaatatccatcttgactaaattactttctttattttcgatgaattcataatcaaatgatgcatatcctttagtattagatttaagttgatcgaagaaatcaaatacaacttcagctaaaggtaattcataaacaatatttacacgaatatcatctaaatagtccatatttataaattgtccacgtttacgttgacataattccattactgcaccgacatagtcatttggaaccatcatagttgcacgaacatatggctcaaatattttatcaattttatcacgatctggcatttgtgctgggttatcaaccgtcacttctgaaccgtcccttaaaacacattgataaattacagatggtgcagttgcaattaattcaataccaaattctctttcaattctttcttgaattatttccatgtgtaacatacctaagaaaccagttctataaccaaaacctaatgcttgtgacgattcaggctcaaattctaatgatgcatcattcaattgtaatttttctaatgcttctcttaaatcattataatttttgttatctattgggaacagtccgcaatataccattggattcattttcttataaccttgcaatggttctgatgcaggtctactagctaatgtgatggtgtcaccaaccctagaatcatcaacatttttaatacttgcaataatataaccaacatcaccaactgttaattcatcaactggaagctgcttaggtgtattaattccaacttctgttacttcgaactctttaccagtggccatcattcgaattttatctccggctttaacaacaccgtccacaattcttatcgatgaaattacccctctatatggatcatactcagaatcaaatattaacgcttttagtggtgcttctgggtcaccatctggagctggcacaacttcaactattttctctagtatctcttcaattccaatgttagatttagcacttgctaaaacaacatcgtcttggtctaaacctatcatatcttcaatttcttgtttcacgcgttcaggttctgcagcaggtaaatcaattttgttaataacaggcaataactctaactcattatctaatgctaaataaacatttgctaatgtttgtgcttcgataccttgagccgcatctactactaaaatcgcgccctcacaagctgccaaagaacgtgacacttcatatgtaaaatcgacgtgtccaggcgtatcgattaaatggaatgtataagtatttccatctttagcttcgtactttaaacgtactgcgtttaatttgattgtaataccacgttctctttctaaatccattgaatctagtaactgatcttgcatatctcttgtttcaactgatttggtattttctaaaattctatcagccaatgtagattttccgtggtcaatatgtgctataatcgagaaattccttatattctctcttctttttaagcgttgctcattatccattttatccttctcactttcataaaataaacccgtattatctttcgcatctttgatataataacgtttttaataggtaaatgcaaacgccataatcttggatgaactttgaaattataacaatctttatttaaatacatacttgcgatatgttaatatgttaattacgtacttataattataaaacgtattgattgtgtttccaacacaatttattaaatctgcaaaattttaagctaaccccatcaaataaatgattgcacaacggttagacttttgttaaaatatttcttgttgtaatcaaataaaattttgataagatgaactcacttttaggaggtgacagaaatggcaaatatcaaatctgcaattaaacgtgtaaaaacaactgaaaaagctgaagcacgcaacatttcacaaaagagtgcaatgcgtacagcagttaaaaacgctaaaacagctgtttcaaataacgctgataataaaaatgaattagtaagcttagcagttaagttagtagacaaagctgctcaaagtaatttaatacattcaaacaaagctgaccgtattaaatcacaattaatgactgcaaataaataatctttttaaataaaagttcaagcgcatgcttgaacttttattttttataaagatagaatgaataattccagtattaactgtttatccatatatgatgatttaagtttataatcagtttccgcacaagcatctataatattcaataattcatcaagttgataatgtcttacttgtcctaacgctaattttactctgtatggatgtactcctattgttttagcaatttgctgtccactatatcctttttgactcagaatcttacattgataaaataatcggtaattacttgtaattagtgcaagtaatttaattggttcttctttcatagttattaaatcttttactaaatgaattgcttgttctttctttcttttctgaatgtattcagtcagtaaaaatacattttgctctaaacttctattaataatttggttaacatcctgcttattaattgttggtctatcgcctaaaaataaaatcaacttttctatctcttgtgagacaatattaaagttaatacctgtcaactcaataaataaatctaatgcatctcttttgatatctttgaaattctcatttaatttactttgaatccatttttttatttcttcttcagacatttgctctatttttttaagccttgcatgcttttttagagttttagttaacttttttctttcatcaagtttattttgatatatctcaaagacaatcaaattttcgccatcatatttttcaataaattctattaattgatctacattatgagccatatcttttggcgctttttcacctgtaaatatatatgcatttttaaccaaaattgcttttttatctgaaaagaaaggcaatgttaatgtttcttcaacaattggtgcaatctctgtttcgtataaattatatttcacaaagttaaagtcatctctatcacttttcaaaaattgtgatatgatttctgcactttgtttttcaaccaattcaggcacatctccataaatagctacaatattgtcgctcattcattacaccctttcattcgtttgacacatcaatagattatatcatgtttctgtatctataaaccacttgcatttccataagagcttgaatcaacttttaaattatcatctaagtcaattgtaacttgaccgttttgttgactattgtaaatgcgactgcgaatcctttgcaatcgtttaacaacttctatattaggaagatgatacatattgttcttcccagaagaaatcaaacttattttaggcttaatcatctctataaattctttagaactacttgtcttgctcccatgatgtcctacttttaaaatatcaatctccggcaagttatatttttttagtagtaaagattcattatttttactagcatcgcccattaataaaacttttttattttgatatgtaatcatagtaataatcgaatactcatttttatctcggctatttggaataaaactatcaaaaaatagaaaactactatctccaagtttaaaactactaacttgtcttacatccataagtttaatgttgtacttatggcttaatttcgataataacatcaatgtattactactatatcccttattgtatatcactatatgtttaattttaatatgactaataatatattccacttcaccaatatggtcattgtgtggatgtgttaaaattagatactctaattcatttatccctctttcatttagcgttggtaaaatatgatatttagaaattgaataactaggttgtttagtatcatcaatcactttcccacctgtatcaatcaagacattttggttcttaccgccttcatataaaatactgtctccctgccccacatttaacattgtaattttgtgatgtgaatttgttggaaacgttattaataatgtcagaataattatagtccaaaacgtaaccaatatatatttacgtttagccaataaccaaaatatgtaataaacagaaattataaatactataaatatccaatcattaaacttgggaacagaaaaatgtgattgcttgattcttgtgaataggtctagtaaccagtcatgaaaattaaaacttaggtcaaccaagtaatttagcggcgttaatcccacaataaaatgacttgtaataaagaataaaatagatagcggaaacaatataatcgaatagtacggtacaaaaatcaaattagataaaaatcccacccattgaagttgatgaaagcttggaatggcaacgataaatgaagctaattgtgcaataaacgtaattatgaataatgattgtaactttgacaattgctgtaaaaaaggaaaaagtagcataataaaaaatgaaatgatgaatgaaaattgaaatccaatatcataaacaactagtggatttaaaataaacataattataaatgcaaatgctaatagctgaatactctttattttaatttgcttagtaataaccagtacaagagttgtcattattatagctcttacagcactaggtgcataatttgtgtattgagcaaataaagctaatacaatgattgtaattcctttaatgacaaataaaggtaaatttaatcgttttaaaggttggtaaattaaaaatacaattgcagctatatgcgagccactaactgccagcaaatgatatatacctatctctttaacacgttccttaaattgctcattaacttcttttacgtcaccagtaatcaatgccataatacgatccggaaacttaatacccgaatcataaattcgattcattataaactgtttatgtttctcaattaaattagaccggttcgattctaggcagctttgtacaactatactttgtaatttaagagttacaaacttattgtcattaactttgaattgtcctttaacaatacaattacgactttcaattttctttaaatcaaaattctttttatctgttaaaaagaaaggatatatttcattttttaaactcaacctacctttatatgtgtcactaccttgacgttgaatttggattacttgagcacgctcattaaactgagaattacgttcaatataattgatataattaaatattgcttgttgtgaataatgtaaataccatgcggagaaaatgattaaaaagagagaaataggggcataaacgattttatttttacgataagtaatatacaaaagtaaaatgaaaagaaatgtagagagcactttgctagaattccaaagcactcctacaatcattgataacgcgacaaacagcaaaacattaacctttagtcagatatttagcaacatattctggtgaaaatggaatttttttaaattcaataccagattgtttgagtaatttagttgcatattcatggttatgataatcttctgcatagtagatacgctttatacctgcttgaataattgactttgtacaatttaggcatggaaaatgagtaacatagattgttgcaccttcagtagatacaccttgttttgcacattgtaataaagcattcatttctgcatgtatcgttctgatacaatgtccatcttcaattaaacatccttcatctatacaatgcacctcgccagctacagagccattataaccaccagcaataatacgattatccttaacaatcgttgcacctacagataatctttgacaagttgaacgtaatgctagcaaatgactttgtgccataaaatattcttcccatttgattctttccaagatgttcaccttccatacttaaaatttagtaacattttctaataatataagattaatcacaaaaaataaaatttgcaattaaaataatccattatgtcgtgaaataagatttcagtttatcaaaagttttacttccaaaaccttttacttttttcaaatcgtcaatttcttgaaatgcaccttgttggttgcgatattcaacaattgcattagctttagcttgcccaactccaggaacagacatcaattctgatacagatgccgtatttaaatttactttagtattatttgtgttcccatttttttcgtgcacactgtttacttcaatttgtggttcaacattcttttgtcctttatgaggtatgaaaatcattttttgatctgttaatttttcagacaaattaatttgacttacatctgcatcctccaataattgtgctttatcaagtaaatcaactactctatccttagatgtcattttataaacattaggatgtttaacagcaccttttacatcgacatatacaggacccttatttttggaattatctccatctttgacctggacatcttctactttggacaaactactattttcactagtgctttgtttcagagcagtatctttattttcaaaatttcttgaagtataatcatcttgtctccagaatataaaaccaattaataccataattaaaacaacagcacttagaatatataacttccattgagttaaaaaatctttatagcgtaataaaaattgatacaataaaaccactcctcaactttatacacgtctgagcgagtggttttacttttattttttcgcaatgaaaaacaatctttctgcatcttcattatgttcatctatattaaaatcagtaaatgtttcaacatgtttaaaaccaacttgagctaaccaagacaaatatgtcttttcatcaaatgttctctgaaaatgagactcatcaaatcttgaatatgtttcatcttcatgtcgaatgaaaaatgtcatatcatgataaacacttaaaggtaaatctccttgcacagcatcccatgctaaaaaaatgtcccctttatcatcaatataactttgattattaaacaaagtcatcattttataaacagtatgtacatcaaaaataaatacacctgaatcagtcagatgatgataaacattgatgaatgtttcaatcactgcagtttcatcttgcaaataatttagagagtcacaaaaaatagtgatgatatcaaattgttgttgcaaatcaaaagatgtcatatctccttcaagccaatttacatttgctgatttttgagctgcaacagtcaacatatcaacacttaaatccataccagtaacattacctaaagcttctaattgaactgttaaactaccagtaccgcatccaatatctaaaatatttgattcatctttgcagtgattttttacaatttcaaaccatttttcatatggttgatcttgagtcaattgatcgtacactaggctcatttctgcatattgcgacataattaatacgcaacctgactatatgattctaatggtgcatcttgatataacttttcaatattataataatttctttcgtctttatggaaaacatgtaccacaacatcagctaagtcaattaatatccaacgcgcttcattgtatccttccatacgttttacttctatattttgttcattggctacttctttcaccgctctagcaatcgcttgaacttgtcgttcattatttccgtgcgttacaacaaaataatctgtcatatcgctgatacctttcatttctaaagaaatcgtatcttcgccttttttattgtcaattgcatccacagcaattgctaataattcttgtgaattcatttaatcatcctttattctttcgtcactatagttataataatttaaacagtcaatcgtcttattatataccgtaatatctttctgtattaaaaatagtactgtgcgtttagaaatttcataaattgtcttatctaaactaccttgattgtatgccatatctcgaatatcatcaactcctgggattgttcttccaggttcgatgtaatctgcaataaaaatcagtttttcagtttttgtcatttgttgacgtccagtagtatggtatttgatagccattaatacttcctcatcattgataccatattcatgttccatgattgctgcacacacagggccatgcaatatttcactaccataactcagtagatcattacctaattcgtattgtcgaacaatttgatacattttacctaaatcatcatatttacagaaatcatgtaatacacctgctaattctactttactagtgtctccatcataaatttctgccaatttaatcgctgtttctgcaactcttaaagaatgattataacgtttctctggcagtttctcttttgcaagccgttttgctttttcaatgttcatataatccttcccccttaatatagttttcaacggatttaggaacaagaacttggatagatttcccttcactaactctttgtcgaatcattgtcgaacttatatctaccctaggtatctgaattgcaatcatagcattttcaacattttgactatttttgtctcgatttacaactacaaaagtaaccatttcttttaagtattcaatttgataccatttctctagttggttatactgatccgtcccaataacaaagtacaactcactgtctttgtgttgctccttgaatgccttgatcgtgtcataggtataactttgaccactacgtttaatttcatcgtcacaaatatctccaaaaccaagctcgtcgataatcatctgtatcattgttaatctgtgctgaacgtctataaaatcatggtgctttttcaatggagacataaaactaggtaaaaaataaaattcatctggctgtaattcatgaaatacttcgctagctactatcatatgtgcagtatggatagggttaaactgaccgccgtaaagtactatctttttcattattatggcaattcaatttctttattatctttagattctctataaatcactatcatagatccaatcacttgcactaattcactatgagtagcttcgcttaatgtttcagctaattcttttttatcatcaaagttattttgtagtacatgtactttaatcaattctctgttttctaacgtatcatctatttgtttaatcatattttcgttgataccgccttttccaatttgaaaaatcggatcaatattgtgtgctaaacttcttaagtatcttttttgtttgccagtaagcatatgttattctccttttaattgttgtaaaactgctgttttcatagaattaatatcagcatctttattagtccaaattttaaagctttccgcaccctggtaaacaaacatatctaagccattataaatatggtttcccttgcgctctgcttcctctaaaataggtgttttatacggtatataaacaatatcactcattaaagtattgggagaaagatgctttaaattaataatactttcgttatttccagccatacccgctggtgttgtattaataacgatatcgaattcagctaaatacttttcagcatctgctaatgaaatttggtttatatttaaattccaagattcaaaacgagccatcgttctattcgcaacagttaatttgggctttacaaattttgctaattcataagcaatacctttacttgcaccacctgcgcccaaaattaaaatgtatgcattttctaaatctggataaacgctgtgcaatcctttaacataaccaataccatctgtattataccctatccacttgccatcttttatcaaaacagtgttaactgcacctgcattaatcgcttgttcatcaacataatctaaatacggtatgatacgttctttatgaggaattgtgatattaaagccttctaattcttttttcgaaataatttctttaattaaatgaaaatcttcaattggaatatttaaagcttcataagtatcatctaatcctaaagaattaaaatttgctctatgcataacgggcgacaaggaatgtgaaataggatttcctataactgcaaatttcatttttttaatcaccttataaaatagaatttcttaatacaacatcaacatttttaggaacacgaacgattactttagcccctggtcctatagttataaagcctagaccagagatcataacatcgcgtttctctttgcctgtttcaagtctaacagcctttacctcattaagatcaaaattttgtggatttccaggtggcgttaataaatcgccaagttgattacgccataaatcattagccttctccgttttagtacgatgtatattcaagtcattagaaaagaaacaaactaacggacgtttaccacctgatacataatctatgcgcgctagaccgccgaagaataatgtctgcgcctcatttaattgatatacgcgttgttttatttctttcttaggcataataattttcaattctttttcactaactaaatgcgtcatttggtgatcttgaataatacctggtgtatcatacataaatgatgtttcatctaaaggaatatctatcatatctaaagttgttccagggaatcttgaagttgttactacatctttttcaccaacactagcttcaatcagtttattaatcaatgtagatttcccaacattcgttgtccctacaatatacacatcttcattttctcgaatattcgcaattgatgataataagtcgtctatgccccagcctttttcagctgaaattaatacgacatcgtcagcttccaaaccatattttcttgctgttcgttttaaccattctttaactcgacgtttattaatttgtttcggcaataaatccaatttatttgctgctaaaatgatttttttgtttccgacaatacgtttaactgcattaataaatgatccttcaaagtcaaatacatccacgacattgacgacaataccctttttatccgcaagtcctgataataattttaaaaagtcttcactttctaatcctacatcttgaacttcgttataatttttcaagcggaaacaacgtctgcaaatcacgtcatcacgaaacatattatgctctggtacaaaaccaggtttatttttatcttcagattgaagtggcgcaccacaaccgatacattttaaaatgtcagacaatcaattttcctcccatgtgatataaccttttttactgaaatgacgtaataatcgtctttcaattaatctattaaacttagtaataaagccatcagttcgtttaactggaacaaccataattgtatatagacctcgacgattaccaccaaatacatcagtaagcatttggtcacctataacaacagtttgatctggtctgatattcatcttagttattgctttatcaaacgctttccccattggctttctcgctttaaaaataaaatcgatgtctaaatgctgactaaaactagcaacacgagactcattattattagacacgattgtaatagtgattcctttttcattagcttccttaaaccatgctttaacacgttctgtaggttctttaacatcccaacctactagcgtattatctaaatctgtaataatacctttaacgcctttgtccactaacttgtctaaatcaatttgaaatattgattgaacatatgaattcggcataaaaaacttgcgaactaaacccatttaactcacctttacctttttataattgagacactaatgcttcaacagtttgacttgatgatacagctgctttttctaaaaatgcttcgaagctcatttccgcttctccatttgctaagtctgaaactgcacgaactacaacaaatggtacattaaattgataacatgtttgtgcaattgcagttgcttccatttcaaccgccatcgcatttggaaatgcttttttaattttttggcgttgttcaacactaccgataaagctatcaccacttacaattaagcctactttagctgttaattgttgttgttgtacaacttgagatactttttctattaaaggtttacttgattgaaatgctaccggcatctgtggtatttgtccatattcataaccaaatgctgttgcgtctgcatcatgatattttacatcatcacttataagaacgtcacctacatttaaactttcatctaaagctccagcagaacctgtattaataatgacgtccggtttaaacttattaattaataatgtcgtagaaattgcagcattaacttttccaatgccactttgggtaatcactacttctctatcttttaaaatgccagtataaaatttaacatgtgcaactgaaatttcgcttaattgtgttaatttattttttaatattgttacttcttcttccatggcaccaattataccaatcatcttttgattcacctcttttaaaaaatcctagcatttgttattttatcacattttaatcactacaacgacaagtatcatgattttcattactgtataaaacttttgctttatttttataaaaagctctttcaataacttggtatcataaataattatttttgaactcataacagtgaattcgatgcttctaatttgtctatttttcaaaaactaatcatatcaattacatcaaccaatcgtgtcaagaaactttattaaataacaggaaaatgatatgtttaaaataataatgatgaaataagaggattttacaatggctgaaaataatcaaaatagtctcgtaacaaagatagctacatacggcagttttattgcaattgcgtcgtttgtcattttatttataagtatatttttaaagttttcatttaatatcgagtttacagcaacaattatgaacatatgtcgctacactctaattctaggatttatacttatgtccttacctgatgttgttgataaaaacatcaagaaaattatattcgatgcatttattatcatcgtctttatcttctttttactatagtagttttattttgtaattacacagttaatcatatttgtttcgtatcgaattcctttgtgcattaaagataattctaatagaaaacagcagtaagacttttctaagtgttagcatccttactgctgtttttatttgtaacaacataatgacaggtactttatatttcactgtcaaagattattaatgattaacttaattaaattatgatttgaataaatagatatctaaatgcaatttgtcactattgatagttttattatcagcatacatttttaatacctcacgaccatactcaccatttaaattataaaaatcatattctacattttgttcatcatcattataatatttaacataccctttaacaatgtcgccaccttgttcgtacaacttatacttctcattcaaataatttcttaattgaacctctaattcttgaatagtaacaattttctttttcgtttttactgcagttagttctatttctgtttgatgtccgtcaatccataaattacaaggtatattcttataatcatcgtatttattattgtcacttaaagtaacaccaccataactacattgcgttttattggttgctcccccatgacatccgtatccataatttccagcaaatatatcgatatccttatttataaatttctttgaaagtgcctcattttcaaattcaactttaaaatcctttttccaatcatcatttacgaacatgtcatgaaataacaaatcatgcttcaacagtctatcgtttgtgtttttattttcaagctgagttggattgatgaatgacatcttagcattacttagacgctttgaatcaaacttacttttatgatgtaagtctgaatattcgattgcactcgctgaatttgtaaaaattccttctaacaataatattaaaataaatcctgttaaatatttaacttcaaactcccccaaaacaattattaatttacatttgagagcgagacataaatgataaagaaccgcttatggtttattatgtagtggttcttgagcctacaattttgattatgtatcacgctcataatacttttcaatttgaaatactctgttcgcaattattagttgagttatatcaaccaatacagtgtatacctaaaaattccaaaccgtttaacagtatataagaaaaaatgataatcatttcttttatttttattaaatttcataatgattcatataatattctcattaaaacatcacaatactgatacacaacaaaaagagcagtacatttgtcatgcaccactctcaacaaatatattttttcaatgaagcaattacgcgatcttacaaatactataagtatagctgatcacatattatatttattttataatcgaatttagaaattcatcacttatctcataaattgttggtctacttttaattttaactaagtagttatcatattttttaattgtattattaatttttactcttcctactcccaatatgttttctaaatcaattaatgttaatctatttcttttatttccaaacaatttatccattgaaaggagatacaaaaattcataatctatctgtttataatgactagttaaataaagcgttaatttttcagtcgcatccatttttggtattaactcatcaagtattctttcttgtcctgctatcaatagctcaagcattgtgtcaataaattccgtcaaatcaccacaattcaaatgatttgaagcagtcataaacgccttgtaatatttcgatttatttctatttataacatatgaaaatgtcaaagcagtataattatcataataatcactcaagagcttggcaattataaatcttccaactctaccattgccatcataaaaaggatgtatatattcaaacagataatgactagccatgattttgaacggctgaggcgcatcaaaatattttaaaaatgttagcatttcacctataaattcaacaattttggtttcaggttgtaacccaacatgtatatatttattcgttgacccatcatgcacaccgacaaaatttttacgaaatagctctccatctaacttatcttgttcgttaatttcatttgaaactaatttatcataaatcgctctaatgtctcttacattatcaactttaatttttttattaagttctatctctttatattgatccacgaggcctctgaacttaagaaattctgatgcttggttatttaacgcatgtgcaatctcttgtttagtactaaatacattttcaatttcattagtactttgtaattcatcgattaataaatcattaaaatattgttctctagctgcatatggtaaagaattaagtgctctatcaatttttctactattaattgatattaattcttgtttttttgatagatttttagtcaccataaagaatagaggatattccaaatcattaactttttttccattttccataggtatgatattaatattagtattgaaagaagctaaagaattaaatcttttaatatactcttccttcattttactttcattgtgttcatgaaaaatactttttaaagttctgtaacccatttgcagcctcctctactcatttaaaatgtattttttgtccaataaatcaattttcattagattagctaaatattatcactttttttctttaaaaactatataaataactattttctcaatcaatagaaaaagatttttcatcacaacaaaaagagcagtacatttgtcatgcaccactctcccttaaaatatatctaattatgctttataaatgaatcaccggaaatcaaaatatatcttgcctaatactaacaacatttacagtgatgctattagtcgaaatgtcttttaaaataactgaagtacttctttgaatgagaatatacctgtcaatattgtaacaagtactgcaacgataccaaagatgaacatccaatttgggtgtttataatcaccaacaattgatttctttttacttgcaatcaaaattgcacctaacgtaataggtaaaatccatccatttatcgcgcctgctataattaaaaggctgattggttttccaataaataagaaaatcattgttgaaataacgataaacacaatcacaattaaattacttctttcgttaagtgatttatgaagtgtttttaaaaatgttgcgcttgtgtatgctgagccaattactgatgacatagctgcagcaaataacacaataccaaaaatattctttccaattggtccaattgcgtgttcaaaaactgacgctggtggattttcagaacttagtgtcacacctgttacaacaactcctaataccgctaggaatagtaacgttctcataatacctgtagttaaaataccagcaattgctgattgatttacaaatggtaaatattgcttacctttaatgccagagtctaatatacgatgtgcacctgcaaaggtaatataaccacctacagttccaccaactaacgtaatgatgggcaagactaatttcattggatgttctggcgcaaatgtatgcacaaaagcatcaccataaggtggattagaaacaaacatcacatatgccacaactaaaatcatcacaataccaagaatcattgaaacaacgtccataattttttggccacttttacttacaaagattaatattgcaaagattgcagtaatagctgcgccccattttacatctaatccaaaaattgcatttaaacctaaaccggcaccagcaatattaccaatattaaaagctagaccaccaaatgcaatcaatattgagataacagtaccaagcccaggaacaactttatttgatatttcttgacctcttaaaccagttacaactaatatgcgccatatattaatttgtgcaccaatgtcaatgatgatagacagtaatatggcaaatgcgaaacttgcaaaaaattgtgatgtaaatactgctgtttgcgttaaaaatgctggcccaattgcagaagttgccatcaaaaatacagaacctaataataaccttttatgattttttgtgaattcaaagtcactttcttttttaagctttaaatttctccccatttttttagccccctataaggattgaatatcaatgccttctttcattaaaattcctctaattttcgaaacaaataataatgcatgttctccatcaccatgcacacaaattgtatctgcttgtaacgttacttccttattgttttttgaaataactttattttccttcaccatctttaaaacctgcttaagtgcttcgtcagtatcagtaatcacagcatcactttcttttctactaacgagctgcccatcatcttcgtatcgtctatcagcaaacacttcagaagctgtaattaatccgacattctttgcttctgaaattagatatgaatttgctaatcctactaacactagtgatggatcaaagtcataaacagcttgtgctataacgtttgctatttctctgtcttttgcacccatctgatacaatgcaccatgcggtttaacatgattaattttaacttgatgaatgcgacaaaacccttgtaatgcacctaattgataaatcatcaaattataaatctcgtcgttagagatatctatatttcgtctgccaaagcctttcaaatcaggtaaaccaggatgtgcacctactgcaacattatgtgctttggcaagttttaccgtttcattcattacattttcatcaccagcgtgaaaaccacaagcaacattcgcacttgtaattaacggaataatttgatgatcaccaccaaaggaataatttccaaatgcttcgcctaaatcacaattcaaatcaactcgcattataattccacccctttaacaatttgatgtttttctaaaaatttaatatcaacatcttttgcatctccatcacgatatagtggataatttaaaactgcatataaaaaatcggcagttgtagaaaatccatctatcaccatttcatctaaggtgactttcaacttatcaattgctgaagctctatcatgagattttacaattactttagctactaaagaatcataatatggtgaaacttgataaccgtgatatagtaaagaatcgactcgcacattaaagccttgaggtaaatgtaacgctgtcactttacctggtgttggttgaaatttcttttcaggattttcggcatttattctcgcttctatcacatgaccattaaattgaatatcgctttgtgaaaaaggtaaatgattatgttccaataaatacagttgtgctgcaaccaaatcacgttctgctcgcatctctgtaacagtatgttcaacttgtattcgagcattcatttcaataaagtaatgtgcggtatcagttactaaaaattcaatcgtacctgcacttctataatttgctgcacgtgcaactttaacagcatcgttacatatttgttgtcgtctttcttcagttaatgctgcacaaggagattcttcgattaatttttgatttttacgttgtacagaacaatcacgttcccctaaatgtacataattatcctgcccatctcccataacttgaacttcaacatgttttgcaacaggtataaaagcctcaacataaacacgatcatcatcaaagtatttttttccttcacttttagcttctttaaatgccttttctaaatcttcagctttctttacaatacgtatacctttaccaccaccgccactggcagctttgataacaactggataaccgatgtctttggcaagattctcaatttcagacacatgattcacagcaccatttgatcctggaatcacaggaacacctgcatgatgaactgtttgtcttgctgttattttatcccccatcatttccatcgtttttttagtaggccctataaacgctatgccttgttcctcaacggtttgagcaaattttgttgattctgataaaaagccatatcctgggtgaattgcattagcaccagtgatttgtgcagcagatatgatgcggtcaatatttaaataactatctaaagcattagcttccccaatacatatagcttgatctgctaaatgtacatgcaagctttgctcgtccccttttgcataaactgctacagtttcaatcccatattctctgcaagctcttataatccttacagcaatttcacctctgttcgcaattaaacaacgaagcatttacttaccccctttacttaatacgtaccaaaacttggtcgtattcaacatttgtgccatgatcagctactatttcagtaatttctccagcaacatctgttgttacctcgtttaatactttcatcgcttcaacatatcctataatatctcccttgttaactttgtcaccgacattcacaattggttcagttaattctttactatcttgtaaaaagaatgtacctatcattggtgatttaatgtcatgataatcatttgtcgaaacatcggagttatcattcgcttttgaagctgtcaaatcattattgttcatactttgatttgattgattactgtgtgcagccaaatgattcgagtcagtgaagtcaatttctatttcatcttcaaaatttttatatttaaatttcttaacatcattttccttcactaatttgattatttgttcgattttttcaatattcattttacaaatccccttttaaaattgttgctaattttttcgaagtatgtcgcaagctagatgtatcaaaaattggagtcttttgatgactcttaagaatttcattaaacagagacatttgttcccgattcttatctacagcttcttggaatgatatccatttaaattgaattgtatcttgtggtttcatctgtgctaactttggcagatcaaatttgcatacagttgcaattttggtataaccacctatcgtttgtttatcattaagcagaataataggttgaccatcatttggtacctgaacactaccaagagcaaccggttcagaaatgatatctgcttgattaattggtgcaacgctgtcaccttccaaacgatagcccatacggtctgattgttcagtaattaaatatggatgatttacaattttcgctctagcctcttcagaaaatgcctcgaattgaggtccttgaagaatgtgtataatattattttctggcaataaatcgtcctgtaaatgaatcgtctttccaatgttttctttaaagtcattatttattttcactgttattacatcatcagctaataactttctacctttgaatcctcctatactgcttcgggtatgtgttgcataactttcagcaatagaaggtacgttgatagaatgaccaaaagtaagataaccgcgtgcacctttggttatagcacctatttttaaaatgtcacctttctcagctaatatgacagaattcattgatatagttttattatttagcgaagcattaatactaccaccggttataacaaatgtattttgcgtattaaattgaatggtaggaccaatcaaagtatattcaatcgctggaccatcattgttaattaatgactgcgcaaccttaaaactaaattgatccatggcacctgcgcctgaaaatccaatatgttcataacctattcttcctagatcttgtaccgttgaaaagagacctggttgtaaaatcttaattgacattttcaatcaccacccagtcatcaacattaaagttgccatctgatatatctctttcgatttgtataaatttctgttcatctattgcataaaattgtatccattctcctgcttcgtacattgacattggttcacgctcgctgctaaatacttttaacggtgtgcgtccaataatttgccatccgccaggagaatctgatggatatagtcctgtttgattattcgcaatacctacagaacctgcatgaatttttaaccttggctgattacgtctaggtgtatgtagttgttcatcaagtccgcctaagtatggaaatcctggcataaatcctagcatatatattaaataaggtttacttgtatgtttttcaataacttgctcaacagttattcgattatgctttgctacttcttcaatatctggtccatatgtaccaccatattgaacaggtattttaataatacgattggtttgattcacagcatgaacatttttttcattaaatttgttaagttctaaattttcaattaatttagaagatgttatagcttgttcatcaaaatatattagaactgctcgatacgaagggacaatatcttgaatttctaatatttctttttctcgtatccaccgtaccattgctgtgacattacgatatgtctcttcggatattttattttcaaaataaatcataattgtctgctcgttaataaatcttacatccactttaaatccccctttgtattgcaataaaccagtattgaataccttttcattgtatcattgagaagcacaagttgtttaataagtaattcaaatcgcatacaataacaaatgataatcaatttgttttctcggaaatattttgcttttttaaaatggagtagttaatattgtaactcttacactaatttaggttctgctatcattcggtctgatggaaaatttttacttttcatctgtccgattttttgattttgaatataaaaaagcacgaccgaagtatcattaacacacttcaatcgcgcaattaaataatctatttgatcatttattggatattaacaatttttacgttcatttcgccaccattaggtagtggaacacgaacttcatcatctaaacctttaccaattaacgctttagccattggtgattcatttgaaatcttaccattaaatgcatctgattcagctgaaccaacgatttgataactttcctcttcatcacctggtaattctacaaacgttactgttttaccaattttaacaacgttgttatctccagtatcttcaatgattaatgcatttcttaacatatgctcaattctttgaatatcttgttcgatgaatccttgttcatcttttgctgcatcatactcagagttctctgataagtcaccaaatgaacgtgcaactttaattttctctacaacttcaggacgcttaactgtttttaattcttcaagttcacgctctaatttttcaaaaccttcttgagtcattggatattgcttttgattttccatattgtcatcttcctttactgaattatactattgcttgctaactaaagactgaatttttgttgtcataatatctattgcaactttattgctcccaccttcaggaataattatatcagcatatttcttagtcggttcaataaattggtcatgcataggtctaacaacacttaaatattgattgataacagagtccattgaacgcccacgctctttagtatctcgtgttaaacggcgtaatattctcaagtctgcatctgtatcaacatatattttaacatccatcatatcacgtaataccttattttctaaagcgaaaatgccttctacgataataacatctttaggtttaaaatcaatggtaatgtcacttcttgtatgactagcataatcatatgtcggtacttctactgctttaccatttttcaagtctttaagattttcaattaataaatcattatcgaatgcaaatggatggtcataattggtttctaggcgctcgtcgaaagtcaagtgcttttgatctttataatagtaatcttgagcaagtaaagcgacactatgaccttctaagtttttcataatttcgttagttacagttgtttttcctgagccagatccaccagctatgccaatgattgtagtagctttcattagccaatttcctttctcatcatgttgtttggatatatcgggcgatccactttaatttgaacgatttgtaatggatggcgcgccgcgtctaagctgttaccttcttcatcataaattgcttctactacttgtgtaaatgtttcaatttctggaccaaagaattctatttcttgacctggtttaaagttatttcgttgttgaatagtcgcaatttttgtatcttcattatagtctaataccaaaccacaaaaatcaaatggtgattttttagattgttgttgaccaaacatctgttcttcataaccaggtgttccctcaaagaatgctggtgcagtgtctctatttgcacatttatctaactctattaaccattccggattaatcttaaagttgtcaggatctgccgcatacgcatcaatgactttacgatatactgagacaactgttgcaatataatgaattgacttcatacgtccttcaatttttaatgagtccacaccaatatccatcatttgaggaattgattcgattaattttaaatctttaggactcatcgcaaacggtgtaacttcaccttgattataaaaaacatcaagttcaccattatcatcaacttctaataattcataatcccaacggcaactttgacagcaaccgcctctgttggaatcccttgcagtcatatgattacttaatgtacatctacctgaataggcgatacacatagcaccatgaataaatgcttcgatttcaatatctactttttccttcatttcacgcatttccatcgcgccggtctcacgtgctaatacaacacgatccaatccttcttctttccaatattctacagctttgtaattagaaagtgattgttgagtagataaatgaatttcaagttttggcgcaacttctttacatgtttcgataattaaaggatctgcaacaatgatacctgtcgcaccagtcttttccaaattacgcaaatatgattctagaccttcaatattctcatcatgtgcaataatatttgtcgtaacataaattttggcaccgtaacggttcgcaaattcaacaccttcagctatttcttccatcgtgaaattatcagcatttgaacgtaatccatattcttgaccacctaaaaatacggcatcagcgccataatgtactgctatttttaacttttctaagtttccagcaggtgctaataattctggtttcttcataactgttttaggagttgatttaatctcttctattgtcttcatgattaacctccttaatatactgtttgtttatataagaaaccttcgtcaaatggtcgatgatcaggttgaatttcttcaattggatccatcaacataaatttctcatcttcatagatttcaggatcttcattgtacaaatctatcgcttgacgatactgttccgttaccacattaatatattcttccgtttgtagaataccatcgattttaaatgaatctatacccgcctcaaaaaatggtgctaattcttcaattaaacaaatgtcgtttggtgacataatgtgcgtaccattgtaatcttcgtaaactgggtaattattttgtctttcttcatcataaagtaataaagattgttcatcattgcgacgttcaattttcatttggcgatcttggaacgtataataattgcctagtagcatacgctttgattgaaacatacaagtcattccttgaacttgcacctcaatttccacatttgaattttcttttatattaataatttcatccaaattcagctcacgtgctaagacagctcttgatgcgcctcttttaccccagtaattacattgaaaatgattagttactaacgtctctgcattccaatgaagtggtattggattttcttgcgccttcacatacattactactgctggatccccgaaaataattctgtcaactcgtatttcatgtaaaaaattaatataatcttctacagcatctaaatgataattatgaaataatccattcactgccgcatatacttttttatcgtttttgtgagctaatgcgacagcctctgtcatttgttgtctattgaattcccctggaagtcttaaaccaaacttttgctcgccaattacaaaagcatctgcacctaaatcaataagtgtttccatatggcttaatgacttgggtgtgacaagtaattctgtcatagtcattctcctttaattgaaatcgctaatccatcgtctatatttaaaaaattcgttgtatatcctggttgctttattaaccactcattataatcttgaacctttttaaccatttgtcttacatttctcgatctaacaatcccaatatccgatacaaaaccgtgatataaaacattatctgtaattacgagaccttggtgctttaaaagtggtgtatatatttcaaaaaatttctttgattgcgcttttgctgcatcaataaatatcatatcataaactttgtcatttacattttcaaattgctctaaagcattaccttcaataattcgaacctggttttcaaaatgataagtagctaaattttgtttagcatattgaatcatcgtttcattacgctctatcgttgtgacatgaatgtcatcagatatagaagcgaattgcatagaactatagccgattgctgtaccaatttctaaaatatttttaacattattcatacgaattaattgcttaattaaatctaatgttaaacgatctacaattggcacttcatttacctcggcaaattcacgcaaaacttcgattgaactattttgatgttgatgtaaatctattaaatattttttatttaggtcatccatgttttaaacttcctttatgtaaaataagtcaatatgattatgacaataaaataaatcagccttcacaattgattataattttgccaaccaattaaatgactgatttcgtgttagacgcaaagctattttatttatagaagcgaatcattcatataaaatttaactttagatattttaccatattttcaataaaattataagcgttaattatttatacattgcttgacttaaaaaatactcttgcctccccatctttaaggttagcaagagtaaaatctttttaattattcttccatttcagtatttacaacttcttcaatcatgtcccattcttcatcagtttcgattggtactaacttaccaccgtcacctgactcatctggttcattgatcattggtacaagctcaatcatatcgtcttcatctgattgagcaccttcttcagctaagataacatactcttttttgaattcaggatgataaaattctaaaacttttcggtataaaacttcatttccctcttcatcgaataaagttaataattcttcttcgttattaatttctagttgtgaatcatgattatgttcagtcatagtaaaatctccttttaatgtagtgaatctaaatagccttgtaaaataaataccgctgccattttatcaatcacttgttttcttttttgtcttgaaacatctgcttctaataatgatcgttcagcagccattgtgcttaatctttcatcccacatcacaatctcaatagaaggataagcttctaataatttttctttatatgttaacgaagcttcgcctcgaaatcctattgaattattcatgtttttaggtagtcctattacgactgtacccacattatgttttttaataatgtctactaattggtcaatacctaattcattattttcttcattgattcggagtgtgtctaatccttgtgccgtccaacccattatatcactaattgcaattcctaccgttctactaccgacatcgagtcctaaaattttatgttgtaacataaattatttattttgctcttttaaatagtaagaaacaagctcttccataataacatctctatcaatatgacgaatttgatttcttgcttcattttggcgtggaatatacgcagggtcacctgataataaataacctacaatttggtttacggcattatatcctcgttcatctaatgttcgataaacattatttaaaacatctcttacatcttgcgttggaagttcttcatagtcgaatttcattgttttatcaaagttttccatttgcgacactcctttaattacaaatataactcactatcatcatacaatattatggctttaaattatagatttttaatgtaatctttaataaagcttaatgattttgagatattttcaggttgtgtaccgccaccttgagccatatctggacgaccgccacctttaccaccaacgattggtgccatttgtttgataagatcaccggctttaacgttatttgttaaagatttagggacagttgcaaccatcgatactttatcatcaacattacttgcaagaatgataattgtatcttgtagtttagatttaaaatcgtccattgtcgagcgaattgctttcgcatttggtacatccacttcagtaaccaatactttatagccattgatttcttcaacttgatcttcaatattacccattttaagtgatgtgatttctttgtcacgttgctctaattgttttaataatgctttttcttcatcttgtaattgtgttaacttatcgactacttgatcatcagatttcactttcagctgtgatttcatcgtattaaatttctcttgaatatcttctaaatataagaaagctgctttacctgttaatgcttcaatacgacgcacaccagctcctgtacctgactcacttactattttgaataagccaatttcagaagtattgcggacatgaataccaccacataattcaattgaaaatggtgccatatttactacacgcacaacatcaccatatttttcaccgaataatgccattgcgcccatttctttagctgaagcaatatccatttcttgaatgttaacgtcaatacctttccaaatttcttcatttactaagcgttcaacttgatcaatttcatcattagtcattggaccaaaatgagagaaatcaaaacgtaaacgatctgcttctactagtgaaccagcttggttaacatgatcacccagtactgatttcaacgctgcatgtaataaatgtgttgcactatggttcttttgaatgtcacgtcgatcattttggttcacttcagcagacactgtagcgccaacatttacttggccaaattgtactactcctttatgcaagttttgaccatttggtgctttggttacttcactaacagcaatttcaaaattgtcattataaacaatacctgtatccgcaacttgtccaccactgattgcataaaatggtgtttccgttaacatgaagtatactgtttcacccgcttcaacttgtgaaacttcttcaccattgtatatcaagtgtgttagtgttgtttgagctgtcgcagtatcataaccaacaaaagtacttgcagatgtaatatttttcaatacttcactttgaacttgcattgattgagaattttgacgtgcttgacgtgcacgatcacgttgttgttgcatttctgactcgaatgttgtcatatcaactttcaatcctgcttgcactgctatttcttcagttaattcaattgggaacccatacgtatcatacaatttaaatgcatctttcccattaatttcatttgttgtcgctttagcttttttaattaattcatttaaaatcgctaaaccatcttctaatgtttcatggaatcgttcttcttcagactttataacacgcttaatgaaatctgctttttccttaacatttggataatatggttccataatgtctgcaacaatatcaacaagtttgtacataaatggctcattgattcctaacgtttgactaaaacgaacggcacgacgtaacaatcgacgtaatacataccctctaccttcattggcaggtaatgcaccatcagaaattgcaaatgcaatcgtacgaatgtggtcagcaattactttaaatgccacatcttgttcgttgtttactaaatattgtttacctgatactttttcgatttcattcattataggcataaataaatctgtttcatagttagtacgtacattttgagaaactgaggccatacgctcaagccccatgccagtatcaatatttttattaggtaatggtgtgtaactatgatctttattatgattgaattcactaaatactaagttccatacttcaagatagcgttcattttctccacctggatacatttcttctgccggatcgtcttgtccatatgcttctccgcgatcatagaaaatctcagtgttcggtcctgaaggcccttcaccaatatcccagaagttaccttcaatgcgaataatacgactttcttcaagcccaatatctttatgccaaatgttgtatgcttccatatcttccggatgaatcgtaacgtacaatttatctggctccatacccatccatttatcactcgttaaaaattcccaagcaaattcaatcgcttcttgtttaaaataatcaccaattgagaagttacctaacatttcaaagaatgtatggtgacgcgctgtgaaaccaacattttcaatatcatttgtacgaatagctttttgagagtttacaattcttggctttttaggtgtttcacgtccatcaaaatatttctttaatgttgctacacctgaattaatccataataatgtatcatcatcaattggcactaatggtgcagaaggttcaaccatatgtcctttttcaacaaagaaatctagatatttttgtctaatttcactcgcttttaactttttcatcatttacacatcctatttactgtttttaaattaccattccataaaaattgatgacacagatagtcgatttgcaaaactagtataaatcaatatcattttttattattaaaaaataaaaaacgcccatcctcaaaagggacgaacgttatcgcggtaccaccctagttataaatgcaattcaacacatttatcactttaattcgactatacagttgtgcataaagtagcgttcactaatgtttgttgtacttttcaccaaccagtacatctctgataaacaaatcattaactactcatctttatacgaatttaattctattttagttacatttacgcttgttgtcaacgttctataaagtcatacggcgtgatttctcccatattaatcattgggtcaattttaaacattgtagcttccgttaatacatttgtatctgtttttgttgaatcagacataacttcttcactatcattcgatgacattggcgcttctacttgatcatctattgtcgtttgtgaagctcctgtatcattagttgctgtgttttccagcatttcttcatcttctgaattaaaataatttttcaacaatgtacataattgtgttaaacgcgcttgaccatttgttttcaatccaatatcaaatgcttccggatcaccaagtaaaactaaactcgttttcgctctagttaaaccagtatataatatcggtctttgtaacattctaaaatactgtttaacaataggcatgataacaataggaaattctgaaccttgtgatttatggattgatgtacaataagcatgtgttaattccatcatatcttgtttcgtaaatgtaatttcattaccttcaaaatccacaacaagtacatctttattaagggcattttctttcgcccaaaaaataccaacaataactcctatgtcaccattgaatatgttatcatttggcctattaacaagttgtaatactttgtcaccttttctaaagactacatcaccaaactcaatttctcgtgtgtctttctttttagggtttaaaatatcttgtaaaacttgatttaaacgtttaataccggcatttcctttatacattggtgcaagcacttgaatatcagccatagtataccctttattaacagcactagtaactaccttctcaacaactgttggtatttggtttgcctgacagttaataaaacttctatcatgaaaacgctgtgtaatatcaattttctgacccaacttcattcgatgtgctaattctataatgcttgaaccatcttgttgacgatatacttcagtcagatttactcgtggtatagctttcgattcaattaaatctttaaatacttgaccaggacctacagaaggcaattggtcctcatcacctacaaatatcaattgtgcatctaaaggaactgcacttaaaaattggtggaacaaccaagtatctaccatagacatctcatcaatgattatgagtcgtgcgtttatttcattttctaatatatcctctggctttgtgtcttgattccaacctattaaacgatgaatcgtcattgcttctaatccagttgactcttgtagtctcttagacgctcttcctgttggcgctgctaatacaactggataatcatcattgacataatcatcataatctaatgataagccatgaatctcagcatataattcaacaatacctttaattactgtcgtttttcctgttcccggtccaccggttaatagcatcaccttagaattgatagccgtttgcaaagcttctttttgtgaagctgcatagttcacttgattcgcatcttctatttcaccaatatgcatttgtaaatctgactgttcaatttctgtaagtttatttgtatgcgtctttattctgaataagttttgaacacttttgatttcagaataatacaaacttggaattgcaacttgttcattgtcaataattagtcgtttttcctcatttaagtattgcaacatttcgtctaatttttcaggttcgatgacctcttcatcttgataatttaatacatcaaccgttaaatctataacaacattgataggcaaatatgtatgtccctgtttaatacattcttcttctaacgtatagagcaacgcagcttttaatcgttcattatcgttataagcgataccaatatttctagcaagttgatctgctttattaaaaccaatacctttaatatcataaatcaattgatatggatttcgatctaaaatagtcagtgtatcgccgagataaaactgataaattgccattgaaagtttaggaccaaaccctaaatcatgtaaacgaatcattattttttcagattcttgatttgctgaaatttgttctgcaatttgtttctgtttctttttagataatcccgaaactttttctagcactgaatggtcatctaatatatcatttatcgcattgtcacctaatgtattaacaatattttgagctgtctttttacctacacctttaaacaaatcactagataaataacttataattgcttctttcgtttgtggcatttctttttcaaaagtctctgcttttaattgtttaccataacgtggatgatcaacaacttgccctttaaatgtgtagacatcgccttcaacaatattcggaagaaaccctacaacagttggcattgtatcaaagtcttcatttgtttcaatagtatctactttaagcactgtataaaaattatcactgttttgaaacaatatcgcttcaacagtacctttgatcattgaataatcaaatagtgtagggtctgacatgttactcctcctctttcattttagtgaatgttttcagcgcatgctgacttaataagtgtttagggtcgatagtcacagcttctttaaaatgagttattgcttcatcaatatcttcatttttcataaataacgctaagcccaaattgtatcttgcatcaacatgatttttatcaatcgttaatacatgtttaagttgagttatggcttcattaaacatttctaattgacataatacaagaccatattgaaattgaacttctgcatctttgtctttatctagttccgcagcagtcattaaatacggcaatgccagcttaaatgattctaactgattaaacgccataccgatcatataattacaatcaacttgttcaatctctgtttgtaatgcttgttgatataatttaatagcttcttgataacgttgctgattataatatacatttgctagattaaaaaatacgacgccattcttcggatctattgttaaagctttttggaaaaaacgctctgccttttcaatctcattcgcatcagcaagtacgataccagcattaatataattttcaataattgtaggattttcttcgatatttccgaacaatgcttgtaacgcttcttctatttttccattttgtatgtattgataaattgtttgttgatctatcatttacgaacctcatttctcatcaattataacatcttgataaattgtatgtctcgaatcacttaacaacgaataaaatataatctaatatcatcttcattcatgaaaaagcgggaatggaatagaaatgcttaagaaccattaacggtttattatgtaatggttcttccacattagccaccactattatgtacttaaaaataagaatacataattagattcatgcatagggagtgggacagaaatgatattttaacaaaattaaattcgttatccccaactggcattgcctgtagaatttctttacgaaattctctatgttgtggtcccgccaatataacattgtagagcctaggacattgtgatgtcccagactctatcctcatgaattattctcatcaaaaactgtctttcgtcattttcaacgttgaaacttcaaataagtaatttattgttgccattgtttatacaacataatttaattgaccttcatttttgaacacatcgtcaattgttgcaccaccaagacacacatcaccttgataaaaaacaactgcttgtccaggtgtgattgctcttactggctcagcaaaagtaacacgtagtgcatggtcgttttcacgtttcacaaaaactttcgtatctttttggcgatatctaaatttagctgtacattcaaaaccttgatctaagtcattatcttctggatttacaaatgaatagtctgaagcaattaagtaatcactgtataatgcatcgtgatggaatccttgttctacatataaaacattatcttttaggtttttaccgacaacaaaccaaggatcgccatctccacctatacctaatccatgtctttgtcctattgtgtaatacatcaaaccactatgtttacccattttcttaccatcaagtgttatcatatcacccggttgtgcaggtaaatattgtgataaaaatgttttaaagtttttttcgccgataaaacaaatgcctgtagaatcttttttcttagcagtaacaagtccttgttcttcagcaattcgacgcacttcactcttttcgatgtcgccaattgggaacatcacttttgaaagttgttgttgagataattgattcaagaagtatgtttgatctttattattatctacaccacgtaacatttcaacatgaccatcttcatgacgatgtatgcgtgcgtaatgtcctgttgctacataatctgcacctaaattcatcgcatgatctaaaaaggctttaaacttaatttctttattacacataacgtctggatttggagtacgaccttttttgtattcatctaagaaatacgtaaagactttatcccaatattctttttcaaaattaacagcgtaatacggaatgccaatttgattacacacttcaataacatcgttgtaatcttcagttgcagtacatacgccattttcgtcagtgtcatcccagtttttcataaatatgccaatgacatcataaccttgttcttttaagacgtgggctgttacagaactatctacaccgcctgacataccaacgacaacacgtatatctttatttgacaattatgactcctccttaaatttaaaatatattttatgaatttcagctacaattgcattaatttcattttcagtagtcaattcgttaaaactaaatcgaatcgaatgatttgatcgctcctcatcttcgaacattgcatctaaaacatgcgacggttgtgtagagcctgctgtacatgcagatccagacgacacatagatttgtgccatatccaacaatgttaacatcgtttcaacttcaacaaacggaaaatatagatttacaatatggcctgtagcatccgtcattgaaccatttaattcaaatggaatcgctctttcttgtaatttaactaaaaattgttcttttaaattcattaaatgaatattgttatcgtctcgattcttttctgctaattgtaatgctttagccatcccaacaatttgcgcaagattttcagtgcctgcacggcgtttcaattcttgttcaccgccaagttgaggataatctagtgtaacatggtctttaactagtaatgcaccgacaccttttggtccgccaaacttatgagcagtaatactcattgcgtcgatctcaaattcgtcaaacttaacatcaagatgtccaattgcttgaaccgcatcaacatggaaatatgcatttgtctcagcaataatatcttgaatatcataaatttgttgcactgtgccaacttcattatttacaaacataatagatactaaaatcgtcttatctgtaattgtttcttcaagttgatctaaatcaatagcacctgtatcatcaacatctagatatgttacatcaaaaccttctcgctctaattgttcaaaaacatgtaacacagaatgatgttcaatcttcgatgtgataatgtgattacccaattgttcatttgcttttactatgcctttaattgccgtattattcgattctgttgcgccactcgtaaatataatttcatgtgtatctgcaccaagtaattgtgcaatttgacgtcttgactcatctaaatatttacgcgcatctcttcccttagcatgtattgatgatggattaccataatgcgaattgtaaatcgtcatcatcgcatctactacttcaggttttactggtgtggtcgcagcataatctgcataaatttccatgtttggacactcctcacaattttatcaatgttccaataatagcaccttacatactatttttctacttttctgtttaactttatttataatgtttttaattatattttaccattttctacacatgcttttcgataggcttttttaagtttatcgctttattcttgtcttttttataaattttagtatttgcagatatttttttatttgtaaaatgtaacgtactattattttggttatgagcaatttaatatttatctggttattcgattggtatacttcttatatcataaaaaaggaaggacgatataaaaatggcgattaaatattcagcattaaaccttgtccctattcgagaaggtgaagatgaacaaacagcaattaatgatatggttaatctcgcacaacatttagacgaattatcatatgaaagatattggattgctgaacaccataacgctcccaacctagtaagttcagcaactgctttattaattcaacatacgttagaacatacgaaacacatacgtgtaggttctggaggcatcatgttacctaatcatgctccattaatcgttgcggaacaatttggcacgatggcaacattatttccaaatcgtgtcgatttaggattaggacgtgcacctggaacagatatgatgaccgcaagtgcattaagacgagatcaacatgatggtgtttataaatttccagaagaggtttcattattacaacaatatttcggccctgctcaccaacaagcatatgttcgtgcttatccagcagtaggtaaaaatgtgcctttatacattcttggttcttcaacagattctgcacatttagctgctcgcaaagggcttccatatgtgttcgctggacattttgcacctcaacaaatgaaagaagctatcgaaatttacaaaacgttatttgaaccttctgatgtattagacgaaccttatgttattgtatgtttaaatacaatcgttgctgaaaatgatgacgaagcacaatatttagcttcatctatggcacaagtaatggttagtatcactcgtggcagaatgcagcccgttcaaccgccaacacatgaactacaaaatatattaacgccgagagaatacgcgatggctatggaaagacagaaaatatcattaataggttcagaaaatactgttcaacaaaaaattcaagattttatggaaacttatggtgaagtcaacgaaattatggcaataagttatatttatgataaagatatgcaattagactcttatcgtcggttcaagaatgttataaatcagataaatgaaaaaaacactttataatgtgataaataaactaagtgaaagtatgtatccataatattaataaaaatatacagtaacagcattttgaatgaaagatgtctttattgttcaatcatttattttagtaatgattcaaattcacttaaaattctaatgcaaatatgaaagcgccccttcaactttacactgtgtaagtgtttatttgatggggcgctttcaaaatattgaaaagcatatccaaaatttaaagaaatttatttctctttatcttcattttcttttttctcttcgttattcgatcctgtatattcatttatcttatcttttacatttttaacttgttcattatcgctatttttaaatttttctactgcgtctttagctttatccataaaactcatattaatcgctcctcttatatttgattagtttaattgaacttattttttaagtttatcaattgcatcagttattttgtttttagcattttcaacaacttcttttgctttaccaatcactttatcttgctgaccttctttttctaattctttgttatcagtaacgttacctactgtttctttaacatttcctttaaattgatcgaacttactttcgtctgccatagtgaaacctccttggatgtatatatttatataccactaaggaggttcgctaaacattataatatgaagtttttatgttatagtatagtatttatacgattaaatataaaacatgtatccgtctaaatcttcacttgtatctacatattccgctaaatatttcaatgttgtattatctaaaacatctctcactgcatctctcatgcgaatccatagttgtttttgcgcaggtggttctgattcaatactttcaacaaatgtaattggaccttctaacagtcttataatatcccctgctgagatttcttccgctggcactcttaattggtatccacctttagcaccgcgtacacttcgaattaaccccgcatttcttaaaggacctacaagctgttctaaatataaatcactcaaattattttcttcagcaattgactttaatgatatacatccttgcccctcttttttagcaagagaaatcatcaatgtaagtccatatctccctttagtagaaattttcattgtataacctcacttaattcgaatattgatattcccattttagcattttttgagttaagatagtataagaaaggtgtgacaaatgtgagtacagaaccattagcatcgagaatgcgcccaaaaaatatagatgaaatcatttcccaacaacatttagttggaccaagaggcattatcagaagaatggttgatacaaaaaaattaacttcaatgattttttatggtccacctggtataggcaaaacaagtattgccaaagcaatttcgggcagtacgcaatataaattcagacaattgaatgctgtaactaacactaaaaaagatatgcaacttgttgttgaagaagctaaaatgtctggtcaagttatcttgttattagatgaaatacatcgactagataaagctaaacaagactttttattacctcatttagaaaatggcaaaatcgtcttgatcggtgctacaacttcaaatccttatcatgctatcaatccagcgattcgttcaagagcgcaaattttcgagttatatcctttaaatgacgaagatgtgcgccaagcgttaactcgtgcaatagaagatgatgagaatggtttgaaaacatatcaacccaaaattgatgaagatgccatgacctacttttctacacaaagccaaggtgatgttcgtagtgcgttaaatgcattggaattagctgtattaagcgcagataatgacaaagacggttatcgacatgttacattgcaagatgctaaagactgtttacaaaaaggtgcatttgtaagtgacaaggatggtgacatgcattacgatgttatgagcgctttccaaaaatctatccgtggtagcgacgtcaatgccgctttacattatttagcacgattaattgaagctggagatttacctacaatagttcgacgattacttgtaattagctatgaggatataggcttagcctcacctaatgctggtcagagaacacttgctgctattgaatcagcagaacgtctaggtttaccagaagctagaattccactaagccaagcagtaatcgaactatgcttatcacctaagtcaaattcagcaatgagtgccattgatagtgcattgtccgatattagaaacggtcatgtgggccaaattccaaaccatttaaaagatggacattatcaaggtgctaaagatctaggccgatctattggttacaaatatccacaccaatatgttaatggctatgtttcacagcaatatttacctgataaactaaaaaacaaaatttattacgaaccaaaaacgacatctaaaagtgaacaacaactcaaagaaatatataacaacttacttaaacaaaggccgtaaaaataagattaaatcgattacctttgatattttagctataatcaaatcaaaactgactagtacacgaggcatattctactatgcttgcgaactagtcagttttagttttatggtgtggttacacttgccttacgttgaaaattatccctttcaaaatgaattattgccctttgtctttaatgcgacgaactggaatatcttttaatacgtcattcaccacataacttgcacaaattaatccaacaacacttggcacaaaggcatttgaagaaggtggcatttgtccttttcgattgatagcatttttatctccaactatatcttttacatcttctcttatgacaattggactttcatctgaaaatacaactggaatccctttacgaattcctagttttttcaatttttgacgaataattttggccattggatcggtatgtgttttagagatatctgaaattgtaaaacgtgttggatctgttttatttgcagcacccatactggaaatcactttaatccctcggtcaagacactctttcattaagtgtactttgtacattattgtatcacttgcatctacaaaataatctatatcgtagttatcgaaaatttcttcatatgtctcttctgtataaaacatatgtaagggcgtgactttacaatctggattaattaatttaatacgttcttccatcaaagaaactttactttgtcctaccgttgtagttaaagcgtgtaattgtctgtttacatttgtaatatcaacatcatctttatctattaatataatatgaccaatattcgttcttgctaatgcttcagcagcaaatgaaccaacacctccaacgccaagtatgacaacagtttgttgcttcaataaatctaaaccttgttgtccaatcgctagttcatttcttgaaaattgatgtttcattattttacctctttcactgatttatacataagtacatagtaacttaaaattttatatttagcattatcactttgattattttcccaaaattcaacgaggaaacatttattaaacgctataaaacccaactaattctttattaaaaacttaaagaaacgcataaaaatacgcaagacaaagtcttgcgtatcgatagagtccgtattgccgtagttataatagcttgatcattcggcctgttatatacaggtgggtgccctgtttcttgttttgtacgtccttcatataaggcgtgtacgctgcaagaaaacccattgggctcccttgatcaaagagtgttaggcccaaattaaaaagcaaacttacgaacaactcagatgactatcttatgatgttatattaccacataattaaaattaatgaaattataacaaaccaaagtttattgattttttaaaatttagtgacgaattcgcaaagaaagttcttctaattgtttatcagaaacttcaccaggcgcattcgttaataaacatgtagcagatgctgttttagggaatgcgattgtatctctcaagtttgttctattagtcaataacatgactaatcggtctaatcctaatgcaataccgccatgtggtggtgcaccatatttaaatgcatctagtaagaagccgaactgttcttgtgcttgttctttagtaaatccaagaacttcgaacattttttcttgtaactcaccatcatgaattctgattgaaccgccacctaattcataaccatttaatactatgtcataagcatttgcctcagcttcttctggcgcagtgccaagcttagcaatatcagcttcttttggagatgtaaatggatgatgtgctgcaacgtaacgtttcgcatcttcatcatattctaataatggccaatctgtcacccataagaagtttaattttgtttcatcgattaaacctaattctttagctaatttgacacgtaatgcacctaaactttgtgcaacgacatttggtttgtctgcaacaaacattactaagtcaccagcttcagcaccagttaatgtaagtaatgtttcaacattttctgtttcaaagaaacgtccaattggacctgtcaaaccatcttccacaactttaacccacgctaatcctttagcaccatagatgtttacaaattctgttaaagcatccatatctttacgagtatattgttcagctgcacctttagcgacaattgctttaatttcaccatcattttcaacagtatctttaaatactttaaagtccatatcacgtcctaattgagaaacgtcaattaattccatttcaaaacgtgtatctggtttatcagaaccatagcgacgcatcgcttctttatatgtcatgcgtgggaaagcgccattaatttcaacgcctttaacttctttaacaacttttttaagcatttcttcacccatttgcatcacatcttcttggtctacaaaactcatttcaatatcgacttgtgtaaattcaggttgacgatctgcacgtaaatcttcgtcacggaagcattttacgatttggtagtatttgtcaaatccactaatcatcaataattgcttaaataattgtggtgattgtggtaatgcataaaattcaccatcatgaacacgagatggtactaaatagtcacgtgcaccctcaggtgttgacttcgttagtactggtgtttcgatgtcaaagaacccttcatcatccaaatattgacgaatagaacgtgtaatttgatgtctcattttaaatgtttgcgctaactcttgacgacgtaaatctaaataacggtattttaatcgaatattttcatcaacgttaacattttcttcatttatagaaaatggtggtgtctcagatttattaatcactttaatatttgtaacttgtacttcaacttggccagttttaattttaggattaactgtttcagggtcacgcttcgtaactgtaccttgaacttctacaacatattcagaacgtactgtttcagcaattttcaatgcctcttctgaaaatgcaggattaaacacgacttgtacaattccttctctatctcttaaatcaacgaaaatcaatccaccaaggtcacgacgattgttaacccatccttttaatgtaatttcttgtcctaaaaatgcctcagtaactaatccacaataagttgttctcttactcatattttaacgccctctctacttcttaaaatattcgactaatgcgtctaattcaattgtttcagattcaccagttgtcatatttttaacatcgattttattattttctaattcttgatcaccaataacgattgtaaacttggcacctaaacggtctgcttgtttcatttgtcctttaattttacgctgtaaatagtctttatctgctttaataccattatgtctcaaatgatttaatagcttcacagcatatcgatctgcttgatcacccattgtaacaatgaataaatctaagttttcttcaatatctaattcgataccttcttcttcaagtgcaagcaataatcgttctatacttagcgcaaaaccaatacctgtttcacttggaccatctagcaattctaataaaccattataacggccaccaccacaaagcgttgtaatggcaccatcatagttagggttatccatcattaattcaaatgctgtatgtgtataataatccaatccacgaactaagttaggatcttcaatatatggaatacctaaatcatctaaataagcttttacttgttcataatatgccttagattcctcatttaagaaatcagtgattctaggtgcagtcttaatcgcttctttatcacggtctactttacaatccaaaattcgcatcggatttgtatgcaaacgtgattgacaatctgaacaaaattcatgaattactggttcaaagtgtttcactaacgcttcgttatattcttttcgagacgccatatcccctacactattaataacaagctttaaatgttttaatccaaatgattgataaatatgcataaccatagctaatacttctgcatctacgctaggattttcagcaccaatagcttctacaccaaattgattaaattgacgatagcgtcctttttgcttacgttcatatctaaacatcggtccattgtaataaagtttaattggttggtttggattaccttgcattttatgttcaatatatgaacgcacaactgcagctgttccctcaggtcttaatgtaatacttctatcgcctttatctttaaatgtatacatttctttttgtacgacatcggttgaatcaccaacacctcttgcaaaaagatctgtactttcaaaaattggtgttcttatttctttataattataaaatgtcattaattcatctaattgattttcaatgtaacgccatttctttgaatcttcaggtaaaatatcctgcgtccctctaggtattttaatcattttgacatctccctcggcaaactattttatttaattacctttttaaaactaaaactatatacgaccacttaactttgcacgataaatcataatcttaaaagcaaaagaaaaagcccttgcacagcctgaaactgcacaagggacgaatatccgtgttgccaccctcattggtttaaaaaacatgcctaattgtaatcatcattactttttataagcgtgcatttaataaacccactcaaaacgtttaacgtacgtttaacggctttacttttcataaagcacctcttcttgtgttcaatgtatataaactactcagcataatctttcagtctatggattatattcctacacaatcttagttagattgctacctatttcatttaccatttcaagaatactaacggttttagttataaaattcaatatcaatgataactactttcacatatttttgcaagccctacgcagaaaaataaattttaaggccatcaacaattgcttgttctaaaatttgtctatgtaattgatctttaatcatcgtttcatcagttgggttactaatataacctaattctaataaaacagcaggaacttttgtttgtcttaacacttgataattttcttgtcttgaaccgcgattagaaagtagacctttcttctgaatcgtagcgtctaacgtatctgctaaagctctttgattatcatgataccaataaactgtcattccatttgcattagatgattctaacgcatcattatgtatactcaaataggcatcgcctttgatatcacgattttctagtgaaacatatgtatcgtctgttcttgtcatcttaacagttgcgccttctttttctaaagtacgctgcaattcttttgctgttttcaacgtataatctttttctaaacttttatatttagtattgcttgaagcaccctggtcactacctccatgaccaggatcaagcactattgttttaccttgcaaaggatttttctccttcgtattatccgcgacaatatctaaatttgtgtgccatccagctatccaacctttttcattactggatgtatcttcaacttcaatccatttacctactttaccaatctttttaaaatggtcacctttttcaactttatatatgactggatacgcagcgtttggacctgtacgtaattcagcattttcagttatcgtgatgttcccactatcttcactattgctattcagcaataaaaataaaaagatgataaataagacaaaggcaatcactactattagagtacgtttatttttaagaccctttttagataaccatgcctctatttttttcattgaattttgccgtcctgactttcataaataatagtgactggaccatcattatttatgctaacattcatgtgtgttccaaattcacctgttttcacagtaagaccatacgctcgtagcgcatcattaaaatactcataaatttttaccgcttgatcaggatttttagaatttgagaaacctggacggttacctttttttacatctgcatagagagtaaattgtgaaactgatagtatttcaccattcatttgttggatattaaagtttaatttattattgtcatcttcaaataatcttgcattagcaattttctttgcaattacatctgcatcttgctctgtagagttctgaccgataccgactaataaacaatatccttttttgatttgattatttaatgtatcattcgtcaccgatgcttctttaactctttgtacaactactttcatattttgcacctctagttccaaactcttgttactgtataaacatcaccaagttgtttgatcttttctaccacacgataaacatcattcacgtttttcaccatgacactaatatttattattgcatttttatcaatatctgaacgtcctgaaactttaattaaattgccggctgtcgagctaacagcttgtagtacttcattcaacaagccatttcggtcatacgcagttacctctaaatcaacctgatatttttgagttgcgtcttttgattttacccattcaacattaattagtcgttcagtttcgttcttaatatttgggcaatcagtgcgatgtactttaataccgtgacctttggtgatataacctacaatatcatcacctggtataggattacaacattttgacaacttgataagtacattttctaaaccttctacatagacaccactatcagtaatgatgttgtctttaataggcaatgatttcgtaacttcttgtgcttcatttaaagcacgttgtttatctaaaatacgttgtctttcagttaatttattaacaatctgtaaggatgtcacgccgccaaatcctacagctgcgaataaatcatcttcatttgcaaagttatatttttcattaacaacctgaatatttttctctgtcaaaatatcttcgactctaaatccttgctcttttatttcagcttcaaccatcattcggcctttttcaatattagatgaacgatcttgttttttgaagaaacttttaattttacctttggcactagacgatttaacaattttcaaccaatcacgacttggtccatatgaatgtttactagtacgtatttcaacaatatcgcctgtttgtaaaatatagtcaattggtacaattttgccattcaccttggcaccaatcatcttattacctacttcactgtgaatcgcataagcaaaatcaatcggcacagcaccatatggcaactcaataacatcactcgctggggtaaatgcgtatactttgtcactctgtaagtcatattttaaggtttccataaattcttgagcgtcagacgatgtatgatccgcttcagctaattcttttaaccaatttaacttattttgataagtttgatctttttcacttacttttttaccttctttgtaagcccagtgtgctgcaacaccatgctcagcaatttcgtgcatatcaaacgttcgtatttggatttcgagcgggtctccatttgggcctactactgtagtatgcaatgactgatacaaattttgtttaggcattgcaatataatctttaaaacgtcctggcatcggtttccataacgtatgcaccaacccaagtatcgcataacaatcattaatagaattgacaataacacgtatcgccaacaaatcaaaaatttgatcaaattgttttttctgcttcatcattttccgataaatactgtaaatatgtttaggtctaccatttatatcgccttcgatattcattcggtccatttcagtacgtattctatcaatagccgtttcgatatacgcttcacgttcactacgtttcttcttcattaaattgactattctaaaatattgcacattatcaatataacgaagagccgtatcttctagttcccatttgattgtattaataccaagacgatgtgctaatggtgcataaatttctaatgtttctcgagaaattctaatttgtttttcgcgcggcatggctttcaaggtacgcatattatgtaatctgtctgctaatttcaccaaaattacgcgtacatctttggcaatcgcaataaataacttgcgatgattttcagcttgttgttcttcttttgagcggtattttacttttttaagcttcgtcacaccatcaacaattcgagcaacttcttcattgaacatttcttttacatcttcaaatgtatacggtgtatcttcaattacatcatgcaaaaaacctgcgacaatcgtcggtccgtctaatcgcatttctgttaaaatacctgcaacttgtataggatgcataatgtatggtaatccgttttttcggaactgacctttatgtgcttcataagcaatatgatagctttttaaaacatactcatattcatctgctgacaaatatgattttgctttgtgaagaacttcgtctgcactatatggatattcgttgttcattatatgatacaccccattcatatttattacttcgccttaaacaatgatttaggtactcttgttgaatagtatttgtcccacaccaatcatacgtccgtcgacgataaatatttatcctgtcgtcattaatcgtaatattaattttacttgagcgagtttaatttgtatactattcctacttttaaaacttttacaaaaattcgacctaaatctactgtttcattttttaaatattagttctatgatactacaatttatgaaataaataaacgatgttattaaggtataatgctcaatcatctaacattttcagtaaataaaaaatcctaacatctcatgttaagaaaacttaaacaacttttttaattaagtcattggttcttatacatttgatgaaggatttcatttgataaaattatattatttattattcgtcgtatgagattaaactcataacatcgtaatctttaattttttcaataccatttaaatatttcaattcaattataaatgcaatacctactacgataccgcctaatttttcaactaattttattgctgcttcaatcgtaccaccagtagctaataaatcatctgtaattaacacacgttgacctggtttaattgcatctttgtgcattgttaaaacatttgtaccatattctaggtcatactcataacgaatgacttcacgaggtaatttcccttcttttctaacaggtgcaaagccaatccccattgaataagctacaggacagccaatgataaagccacgcgcttcaggtcctacaacgatatcaacatctctgtcttttgcgtattctacaattttatctgttgcatagccatatgcttcaccattatccataattgtagtaatatccttgaaactaacacctggtttcggccaatcttgaacttctgatacgtattgctttaaatccattaatatttcctcctaaattgctcacgacaattgtgactttatccaattttttatttctgaaaaatcttgatataataattgcttttcaacatccatacgttgttgtcttaattgatatactttgctggaatcaatcgatcttttatcaggttgttgattgattcgaattaaaccatcttcttgtgttacaaattttaagtctaagaaaactttcaacatgaatttaagtgtatctggtttcacacttaaatgttgacacaataacataccctctttctggatatttgtttcttgtttagttattaatgctttataacactttttaaaaatatccatattaggtataccatcgaagtaaatcgaatgattatgttgcaaaactatataaagttgagaaaattgcagttgttgcaaggaattagacaagtcttccattgacgttggtaaatctcttaatactactttatcagtttgttgtttaatttcttcaccataataatattcattcgcatttactttatcacttttaggatgaataagcacgacaatattttcatcattttctgtaaaaggtaaactttttcgcttacttctataatctaatatttgctgttcattcatcgcaatatcttgaataattatttgcggtgattgattaccattccattcgttgatttgaacagatcctaatatattaattggctgttcatcttgtaactcaggttctaagtgtccattttgccaaaatagcgcggcgatattactttcaccaagtgtcaattttagatgatttttttgttgacctatcgccttaactgaagaaactgataaatcatccatttcaaaaataggtctagaaaaatctgttccgaagggtcttaaacgattcatatcacgaatatttttaatcgttatatcattttctgttaataatacatctacttgctttacgggatctaacgaagttgttttagataattctttcatccatttatttaaaccttcagctaacgattctatattttcaatatccatcgtcatacctgcagccatatgatggccgccaaatttagcgattaactcttgatgtgctgatagtatttcaaacatcgacacttgatcaattgatctggcggagccttttgcatgattttgctccctatcaatatttaaaattaatgttggcaaagcaaatgtttcgacaattttcgaagcaacaatacctaagacaccttcatgccaattttcttttgctaaaagtaaaaataaatctccctttttaactttcgtttctgccatagccattgcttcttctgtgatagttgctacaatatcttttctttcacggttaaaatgttcaacttgttctgctaaaaatgcagcttcttcttcgacgtcagtcatcaacaattcgcaagctaatgatgcgtcatctaaacgacctacagcattaagtctaggtccaataataaaaccaattgtttcttcatcaatattgtcattgtatcccgcttcttttagcaatgctttaacagaggtcggacattgatcatttaagacttttaatccttgtttcactaatgatcgattttcatcagttaaggatactaaatccgcaatggtacctatcgcaactaatgctttaaaataatcaggtacattttcaatcaatgcttgtgctaatttgtatgcaacacctgcaccacacaattgttggaacggataattaaacgatggatgcattggatgtacgattgcatatgcttctggtaatgtactaccaatttcatgatgatcagttacaatgacatcaactcctaaatcttgaaccattttaatttcattatgaccttgtatgccattatcaacagttatgattaatgttatgccttcatcatgagcatttctaaatgctagttcgtttggtccatatccttcggtaaagcggttaggaatatgccatcctacttgtgcacctaaaagttgtaatgttatcactaaaattgtagttgcggtaacaccgtcggcatcgtaatcaccataaactaggattttctcatcattcgctatcgctcttttaattctttcaatagtcttagtcatatcgctcaattgcagtgcatcatgattgatatctgtatctgaaatgatggattctattgcttgttcatcaataatcgatttactttctaatattttttttacgattggcgttaactttaattttgatgttaattcatcacttatgtattcagctggtttagttaatttccacttatacttcggtttaatcatatatatttacgcctcatttccaaaagacattatatctaaaattactttaaataaaaagcacttatctaaataatcaagactttaattataccattttttaaaaatgaatgcgggaacttatttatatatattttgttaaatttaaataaagtaaaaagcggtatgtgaactctttattgtttcacataccgcttaattcattttaaactaaaatcttttcatcgttcgatttcttttctttatatacaactaatttgtgtttcggcgattttttcaactgacgttttttcattattccccatagcggaacggcaatgaagattgaagagaatacaccagaaatcaatccgataaataatgctaaagtaaagttgaatatcgtaggagcaccgaagaatagtatagcaactactactacaataactgttaatactgtattaattgaacgtgtcattgtctgtctaattgatctattaacgatatcatcaatttgttctgttgtcgtaatcactttaaccttttgtaagttttcacgtacacggtcaaacgttacgattgtatcattaattgaataaccgacaattgttaatacagcggcgataaatgttaaatctacttcaattctaaataaactgaaaatcgctactataatgaatacatcatgtaataatgccaatacagatgaaagacccatgcgccattcaaatcgtaatgatacatagatgatgatacctatcgatgcatagattaatgcaagcattgcattttttgctaattcctgtccaataattggtgatacagtgttaatttgaggtgtgtcaccgaatttcgatttaatattatcactcaatttattatcttgagcacgcgttaaatcgtctttaaattgaacagttgctactttattgtctttaccattgatctgaatttgatccgctttaagtccactatcttttacaacttgctctaccttttgttgagtaattgcttgtttagattggaaatctacgcgtgtaccacttgagaaatcaattcctaagtttaacttgaagatataaagaataactaaaccgacaactacaattaaaatacttactccaattaatggcttagctaatttaacaaaattccatttctcgaatgaagttttaaggtcatgaacatctacaccttcattaatatcatgtcgtttattctttttaacaccaaataaccaaaattgatttttgaatatatttgatgaaacaagtaatgataataagaatcttgataagaacacggctgtaacaaagatcattagaatacctaataataacattgtcgcgaaacctttaactgaactttcaccgaagaagaataatactgctgcggcgataactgttgttaagttagaatcaaaaattgttaggaatgaacttttgtttgctttagaaaaggcttgctttatcgttctacctattcgaagttcatccttaatacgctcatacatgataatattggcatctacagccatacctacacctaataccaacgccgctaatcctggtaaagttagaaccccggaaatgaaattaaatgctactaacgttagatagatataagttgtcaatgcaataatcgctactaaaccaggtaatcggtagaatccaagcatgaataaataaattaatgctacaccaataaacgatgcaaacacagttttatctaatgcatcttgaccaaattgggcacctactgagtttgaataaatttctttcaagtcaactggtaaagaacctgcatttaacaattcggcgatttgttttgcttttttaacgccttcttgtcctttaaatccacccgagatttctacgctatcagaattgattggttgatcaacacttgctgcagaaataaatttagggtttttcttttgtgcttcttttttatagctgtcaccttttttgaaatctaaccaaacaaccatgacattatcacgtttcttagagatttcttccgttacttttttaaatttgtttttgtcttttactttaaaagtaactgtaggctggtttgtttcctgtttaaattcttgtttggcagatccctgtttaatatcagaaccgcttaattttactttatcttctgcatcgcgaattgttaaattagcttgagaagataaaattttacgtgcttcattctggtctgttacaccagcaagttgtactctaattctattaggttcttcaacttgaattttaggttccgaaacacctaaaacgttaacacgattttctaatgtttgcgctgttgattgtaaggcttttttatctattttgtcgcctttatttaaaggatcgacttgataaagcacctcaaatccaccttgcaaatcaagtcctaaattgacattctttataacacttttataagttgcagccattccggcaaacaacaatacgactaaaagcaagaacgcaattattctactacttttcttcacatgaacacctcattatttacgtatgtatttagaatacttgaatactattttataacgcaagttaaatctttcttacaaaatttattagccttatacatattaacatactagagcagggagtaaaaatagtcatagatatatttaatttaaatttaacaattattatgtatcacaatttctttttttggaataaaaataagctattctacatactacttataacttaaaaaggatgaaacgctattcgtttcatcctttttaataccacttctcattatgaagggtcaacttgtttaatagcaggtttttcgaaagttaattcagtaccatgaccattaactgtaataacaacagttgtttcatctactgctttaacagtacctttaataccaccaatagttgtaattctttgaccagattgaatgttattaatcaactcacgatgctgtttcgcacgtttttgttgtggtctgatcatcaagaaatacataaccgcaaaaattacgactatatatattagtaatgaaaattgcattttatacgctcctcttgcttaaaagttttttgggttctcaacatttaatccatattgctcgaagaattcttctttgaaatctaaaagacgatcttctcgaatggcttgtcttatatcttccattaattttagcagaaaatgtaaattatgaatagtagtaagacgaataccaaaagtttcctctgccttgattaaatgacgtatatacgctcttgaatagttttgacatgtataacagtcacaattctcatctaacggtcttaaatcatctgcaaattttgcatttttaataactaaacgaccttgcgatgtcatacaagtaccatttctggcaatacgtgtcggtaagacacaatcaaacatatccatgccgcgaatactacattcgattaacgcatctggagatcctacacccattaaatatcttggtttatctttaggcataaactgctctgtatgttcaaccattttatacataaccggtttaggttcaccaactgacaaaccgccgattgcataaccaggaaaatctaattctactaaatcctttgcactttgttctcttaaatcttcatattcgccaccttgtataatgccgaacaatgcttgatcttcaggtctttggtgtgcatctagacatcttttcgcccaacgtgttgtacgttcaatagatttttttacataatcatattcagcaggcatcggtggacattcatcaaatgccatcataatatcagatcctaaatcattttgaatttgcattgatttctcaggactcaaaaataatttagacccattagtatgatgtctaaattccacgccttcttctgtaattttacgtaaattacttaaactaaacacttggaaaccgcctgaatctgtaagaatcggaccatcccaattcatgaatttatgtaatcccccagcgtgtttgataatatcatttccgggttgtaaccacaaatgatatgtgttgcccaaaatgatttttgcttcaatttgtcttaactcttctggactcattgttttaacggttgctttagtaccaactggcataaacataggtgtttcaaatgaaccgtgtggtgtgtgcacgatacctaaacgcgcacctgattgtttacaagttttaatgtgttcgtatgttactgcaggcatattcaaaatcctcacattctttttatataattaacattgcatcgccaaaactaaagaatctatattctaaatttactgccgttttataagcattcagaacattttcacgactactaaacgctgatactagcataactaatgttgattttggtaaatgaaaattagtaatctggccatcaattgctttaaaatcaaatcctggataaataaatatattagtccagccactcgtttcaacaaatttatcatgatcgcgtcgaattgtttcaagtgtacgtgttgaagttgtaccaactgatataatgcgatgtcctttggacttagtatcatttaataaatcagctgtttcttgtgtcatttgataatattcactatgcatttcgtggtcattcacatcgtctacgctcaccggtctaaacgtacctaacccaacatgtaatgtaacaaatgcgatattaacacctttatttttaatttcaattaataactcatcagtaaaatgtaatcctgctgttggtgctgccgctgaaccactttctttagcgtaaactgtttgataacgatctggatcatctaaacgttctttgatgtatggtggcagtggcatttcccctaattcatctaatctttcttgtaaaataccttcataatgtaaacgcatgatgcgtccaccttgatccatttcttttatgcattcagctataattttgccattaccaaaattcaatttattaccaactttaatacgcttagctggtttcagtaagacttcccaatcattaccttcaatttgagttaacattaacatttcaacttttgcaccagtttcttcttttaaaccaaaaagtctagctggcattactcgcgtatcgttaagcactaatgtatcaccaggtctaaaatactcaatgatatctttgaaatgtaaatgtttcatttcaccagtttctctatccatgactaataaacgactatgatcacgatcttttaaaggcgtttgagcaattaatgattctggtaagtcatagtcaaattcttcaatattcacgttattctctctcctcattcgactttgcaaaatgttcataagctaatggtgttgcttttctgccacgtggcgtacgttctaaaaagcctttctgaataagaaatggctcataaacgtcctcaattgtaatacgttcttcaccaattgttacggcaatcgtatctaaaccaacaggtccgccattatactgcttaataatacagttcatcattttatgatcaatgtaatctagtccgtgttgatcaacttgaagtaaacctaatgcgtgcttcgttgtttcaatgtatatttgttcatcttcattcacttgctggaagtctcttacccgcttcaatagtcgatttgctactcttggagtccctctagaacgtttagcaagttcaatggcactttcttcatcaatacctgtgcctaaaacctcagctgttctaataatgatttcttttaaatctgattcgttataatattctaatcttaagtgcacaccaaatcgatcccttagtggacctgttaagctgccagctcgcgttgttgcacctaccaaagtgaatggaggtaagtcgatacggatacttctagcctcatcgcctttaccaatgataatatctaaaaagaaatcttccattgcagggtataacacttcttcaacaacactactcagtctgtgtatttcatcaataaacaaaacatctccaggttgaagtcctgataaaattgcagccaaatcaccaggtctttctaatgaaggccctgatactgtacgtatattaacttccatttcattggcaatgatattagataatgttgtcttacctaatccaggggggccaaaaagcaatacatgatctaatggttcatgacgaagtttagccgctttaataaatacttctaaattactttttattgaattttgaccaatatattgtcgtaatctcgtaggtctaagcgacaattcgaaatcagtttcttcactatgcattgattgatcaaccatacgctcattcatgacaacacttcccctattaatctatttaaaattaagatacaactaattgaagacctgccttaacagcttcatcaactgagtcatatttatttttatttaacgttttctcaacttttgcaagctctcgtttagaataacctaatgcttctaacgctaacattgcttcttgcacgaattgatcttgcaccgtcgaagtagcgtctacttgtaataatgaatcgctatcttcttcagtaattttcactttaccttttaaatctaagacaatctgtcttgccgttttcttaccaattcctgggaatttagttaaatacgtatcattttcattttcaatggcacgttttacttcattaggcgtacttgtcgctaaaatagctaaagctgatttcggaccaataccagtaactttaattaaactcaagaacatatctttctcttcttcactactaaatccatacaataattgtgcatcttcacgaacaattaaagatgtatgaattaaaacttcatgatctagatgcttttgaaaacgataagaatttggtgtttgaatttcataaccaacaccagcagtttcaacaactacgtgtgtaggatataaatgtgttaacttacctttgacatacgcgtacattataggcacatccttacatactcatactaattaattctacttttgatacataatctaaatttctcaaagcgccaataacatcttctactgaagtttctttagatttagcattcagtgataatgttattgttgctttttcttccattggaatactttgatgaatcgttaatacagatagttctaactttgatataacatctagtacacgtgccaacataccaacaatatcagttacatataaaattaatgtaaattctcgatggtcaagcattttatcgtctactggaaatatcgtttctctatatttataaaaagcacttctagatagatcaaactgtttaacggcatcataaatggacaatgtcggatcactttttaaggcatctttaatcttcaatgttttaaccacggattcaggcaagacatcttctctaattaaataaaactttttataatctttattgtccatcatgtttcgctcctattcaacgaattcaaattctccgccaagaattctaacgatatcaccatttttacaaccacgttctctaagcgcatcatcaatacccatcgaacgcatttgacgagcaaatcgacgtactgctggatcactgttaaagtcagtcattttaaacattctttcaatagcattaccacttaccacataagcaccatcatcatctcttgaaattgtaaatttatcttgtgacggtgtatgtttatataatactcggttaatgccaactgactcctcttcttcaactgtgaagtcaacatctttatattcttctaatttatctgctattgcatataataattgatcaatattatcacgcgttattgttgaaactggaataactggcacatcttcgccaatttcttctttaaacaagtttaaattatcttgtgattcaggtaaatccatcttgttagctactacgatttgaggtctatcttctaaacgttgctcgtacgcagctaattcttgattaatgactttataatcttcaataggttctctaccttcagaaccgctcatatcaatcatgtgaacaataacttttgttctctctacatgtcttaaaaattgatgtcctaatccaacgccatcagatgcaccttcaattaaacctggtaaatctgccataacaaaactacgttgatcaggcgttgaaacaacacctagatttggtttaatcgttgtaaaatgatatgccccaattttaggcttagcttttgaaacgatagataataaagtcgatttacccacactagggaaacctactaatcctacatcagctaataatttcaattctaaagatacatctaattcctcacctggttcacctttttcactgaagtcaggtgcagggtttctaggtgttgcaaaacgtgaattacctcggccacctcgaccgcccttcgctactacagctctttgaccatcttcaacaagatctgctaacacttcgtctgtttcaacatttttaataattgtaccaggtggaacttttaatactaaatcttccgcatttttaccatgcatattactactttggccattttcacctttgcttgctttaaaatgacgttgatatctaaaatctaataacgttcttaaaccttcatccacttcaaatacgactgaagcacctttaccaccgtcaccgccagctggtccaccaaatggtacatatttttctcttctgtatgcggtaataccattaccaccatcaccggctttaagagatattttgacttgatcgacaaacatatatctcacctcttttacatataattttcattttcccaataattatagcatattagagccccttatatattgtaaataattaggggctcttatgcagttacttttataaatctttgctttaaaatacttatatttctcagcaccaattgtggtacagtttattctttaaacgctgcaactgtattcctttgtcccccttatagtttagtgattaggggctcttatacagttgcacatttagtataacgtctaaaattcccattttttaataacataatgaaaataataatgaaaaacattttataaaaagtaaaaaacaccagaagattcacttctggtgttaactagacaaaattattcagctactgcatatacagaaacttgttttttgtcgcgacctttacgttcgaatttaacaacgccgtcgattttagcgaataatgtatcatcgccaccacgacctacattttcaccagggtaaattttagtaccacgttggcgatataaaattgaaccacctgttacgaattgaccgtcagcacgtttagcacctaagcgttttgattcagagtcacgtccgttttttgtagaacttaccccttttttagatgcgaagaattgtaagtttaattttaacatcggaatgcacctcacttataatttaatctaatattctcattatattcttcttcaatagtttgtaaagacacaagcattgtttgaagaattagttgcgcttcatcgttgtttgtatcaacgcttcttatatgaaaatgaccaccattgtcgtcataattgatatctggtctctcagatgtcaatcctataatcgcattaacactaccaaacaatacagctgaagctccagcacaaacgatatcatgaccatattcaccatggtcagcatggccatccataataacgtctgttactttgccttcatcattaactgtaatatcaacagtaatcataataattacgcgttgattttatcgattgttaatttagtgtatggttgacgatggccttttttacgttttgaatttttacgacgtttgtatgtgaatacagtgatttttttaccgcgaccttgtttattaacagtagcagtaactgttgcaccttcaactgttggcgctccaactttaactgaatctccacctacaaataatactttatcaaatgtaaaagtatctccttcgtttacgtctaatttttcaacgaagatttcttgaccttcttctactttgatttgttttccacctgtttcaataatagcaaacatactttgcacctcctgtataataagtcacgccatacataggtgacatttcgttattgagtcaagcgtttgcactctgtgggaaaatcgctttcttcattaaaaatgttcttgaacctatatttgagcggttgtatgtagctacttataactactcaactattgcatcttaccattgacgacgtttcatgtcaatgtcattgtttgtttttttaaggaactttataatcaacggataaagcataatcaacagtacaaaattcataattaatgttggcaataatctaaagactacaaaatgaataatatcaaattgaatgaatcctaacataccgtatattaatgccacatagacttctaataataaggtgctggctaatataataatgaataacatcgaatgatctttgtaaaaaattttaaagaatcgatctataagtgctaaaaacaatatatagccaaataagtacactccataaatactaccaaagtatacatcagtcattacgcctaaaaatatgctgagcaataatgatacgccaaagccacgatacactaccatcattaaaatatacataaatgtaaggtgtggtacaaatacaagttcaaacttacctatgtgcattggaataagaagcccaattgcagtatctatataaaatagtaaaatacctatcaaaaaataatacagtgtacgcattatttatccctgctttcatcatcaggaattgttttaggatctctttttgcaacataaacatgactcaaatctgttaagtccgcaccagtcttaaccctaacttctttagctaagccgtattgatcattttgaaccttagtcacttctcctatatataaattacttggtagttgatcagctaatccacttgtaacgactttatcaccttttgagatattatctctattattaatgtcactaattacaagttctgagttcttttcatcataacgatcaattaaaccaaatatatttttagaaccgtgttgtatatttacagataatttacccgcacgtgtattagttgagattaaatcaacttgtgaagaaaatttattaactttagtaactcttccaacaaaaccttgtgatgtcatcacagccatatttgaagttatacctgatttagatcccttatcaattacaattgtattcatccactgatccggatttcttgccaaaaccgtagtagaaataggatcaaattttgaaatatcttttaaatcaagctctttttttaatttttcattttccgcttctaattgttggttcttagattctaactggctaatcttatttttagattctttagaatctccttttttaaaaaagtccccaatcgtaccagcaacaaaattaactggataactcacaactcgttgtccaaaagacacagaatcacctatatattgttcaggaggtgattgagattgtgaacgtatggacagcccaattaatgcaataaaaacgataattgcacataaaacaacaattaatttgttatttttaaaaaacttaagcacccagaacacctctattatgtcaaaatattgtatatccttttctattttatattactcccattatgaaataaagcactaactacgaattactttgaaaatgaacaactccgtaaaaaatttgtggcattttaaaaacaaaaaaactactagcaaacattccagtcactagtagtttaaataatcgatttaaattttaaaattatttgtttgtatcgttcgaggattcactgttcgaattctgaagttgtctccaacgtgcgaataagttctgggccttttgttgttcattagcttgtttctgttttgattgttctgccatttgaactacaccaaccttttaaatttattctagtgacaggataactaaaatatatttcttatgcaataatttcctattgataagcattttcagattttagttgtaaattttgccctaattcatttaagtcttgttgcatttcaaattcagtattgtaaacacgcattgactcatctccaaatttataaagaataaattcgtctcctctttgacctataatatattgatcattataagccatgcgattcattccagacacagccataaactcttgtttatctatcattttaaatacatttttaatttggcttaatggtacattctttattaaatcattttcttttaatgaatatttctcaccacttacataaacatgttgggcatcattagtgggttgcgtaacttgattcatttgatcattatcgtgatttacaggattccaatcttgttcttttaaaaaaggtgcgtatttcaaggcgatataaacaattatcacaattgctattactgctataatgtttttaatcatactaaatatcaatctcatagttcgcctccaatgtcttcatctaattatatattttattatgtatattttcctcagtcttcagccttaatcatgatatatcttaggactgatgcacgttcatttaaaatagcttataattttgttatgatttaaaagcgtattaggaggtttgtagcattgagtatactaacaattattttaatagcactattagtcatcctcctttttagagttggactttctattttgcgatttttaatttatgtcggacttgttttattatgtatttacttaggatatcaaggtttaatttggttgctcgatttttttcaaataaatagtggatttttaccgcactttcaatttaacaattaaatttattctgcataacaaaactcctaatgtactagtttagaattttttaactagttccacattaggagttttagtttgttttcaagcacggatactacttgatgaacagattactattacttacgcccaaatgcgttagataaaaatcgtatcagcgcgtagctaccacttagtaaaaggccccaaacgattccagtaaaaattgagccaattgctacacttaataaaggaaaagcttgtttcgtaacgattacacctgctaacgcggttactaaaatacctaacgtagataaagctaatgttattaaaagattgcgctttgttacaggttcatttttaatatttaactgcatggtataaaccattggcacgagaaccccgataataataaatagagtcactatttttcctccaatgaaagtacttcgtaggtattatacacaagatacgtcattaattctatcaacttcaatcattttcatcaaagtaacccgcttctacaagactggtaaatctattatcaccgattataatatgatccaataaatctatccctaaaatcaaaccacactccttcaacctcattgttgttatgatatcttcttgtgagggcgttacatcttatcaagagtaaattacaaaagaatcatttaaatcaatactttcactttgaatacatgtatttgaagtggaaggtacttatttcaaaaatagtaaaacctgtatcttaaattacttaatagtaacataagatacaggctgattttttattcattgttatttatactaaagcacccgatagctctgaaaacaatcacaaattcaacttttcaaagccacagctttaagttattttgtccagacaacccccattgcccaacccattttatggaattggcatccaggcaacaacttttcatataaatcgtaataattttgttcagataggtacttatctgaagctaaatgctcaagccatgatttagatgtgttgtgattataaattctaatcgcattttttattccaaatttgaaacaatgcggtaaaaactcttggattgcccctaatttataaacataggtaggcggtgtctcgacttcagatacattatcaagaataactattcttccttcctcattcaacagttccttcatttgctgtattacgctggctatatcatccaaatgatgaaaggttgttcggcttacaataaaatcaaacttctcattaaaattaagttgttctgcattcatattcagatagaccgtatttgttagttgacgtttagatttggcaagatcgagcatttgattagaaatatcaatccctaccacttcatcataataacttgctaatttctccactaacaaacccgagccacatccgatatctaatgctctgcctttctttggagacatattagacacaaagaatgaataatcattcaaaagctcattcacgaaatcgtaatcttctgcaaccttatcaaactgtgattctattgtattcaaaaagatcccccattcctactttatcgacattctttcattacttaccactttagatgttttttcgttggggataaaacttccctttagacaattttatccaaagacaatacaacagtgcaactttattaaagtcactgtcctttatcgcagcctttactttttagtaaagacagtggcttctcttatcaagtttcaaaacatattattttgaagaaaacgtccatctgaagtgtcaagtgcaaaattacatataaaggtttattctaaaatgaaaagatgatacaatcatattcagttacataaggaggtttcaattatgtgcaccagtatcgcagtagtagaaattactttatctcattcataatgaaaaaaatggaaaggagataaaagtatgggtactttttctatatttgttattaataaagttcgttatcaaccaaatcaaaattaattggttataatgaacgcttaatgtcagttcattataaccagtaaggagaaggttataatgaaccagaaaaaccctaaagacacgcaaaattttattacttctaaaaagcatgtaaaagaaatattgaatcacacgaatatcagtaaacaagacaacgtaatagaaatcggatcaggaaaaggacattttaccaaagagctagtcaaaatgagtcgatcagttactgctatagaaattgatggaggcttatgtcaagtgactaaagaagcggtaaacccctctgagaatataaaagtgattcaaacggatattctaaaattttccttcccaaaacatataaactataagatatatggtaatattccttataacatcagtacggatattgtcaaaagaattacctttgaaagtcaggctaaatatagctatcttatcgttgagaagggatttgcgaaaagattgcaaaatctgcaacgagctttgggtttactattaatggtggagatggatataaaaatgctcaaaaaagtaccaccactatattttcatcctaagccaagtgtagactctgtattgattgttcttgagcgacatcaaccattgatttcaaagaaggactacaaaaagtatcgatcttttgtttataagtgggtaaaccgtgaatatcgtgttcttttcactaaaaaccaattccgacaggctttgaagcatgcaaatgtcactaatattaataaactatcgaaggaacaatttctttctattttcaatagttacaaattgtttcactaaattaaagtaataaagcgttctctaatttcacaagaggacgctttattcttcccaaaaattgttcaatatttatcaataaatcagtagttttaaaagtaagcacctgttattgcaataaaattagcctaattgagagaagtttctatagaatttttcatatacttaacgagtgctttcacctttgaatatagtccttcccacttatcatcacactctccccgatagccttttctagctatatccagtaaagttacatgctctttaggtaaaagaggtatagcccattctgcagcgacatctttcgaggtaatttcaccagtagtcactgtttgccacattcgagctagggttaaaattacattacgctcatcaccttttatcccctcaattagttctggcaaagaatccttaattgctcttcgaatatctgtcaaaggtacggagacaagtatacttgaagaatcaggaccaaatagagaaatactattctttcttgcttgtgctaaaacaatagccaaatcaggatcatagcttggttcctgaatttgtccattctcaaattcacccctgagccactcaccgtatataaattctctttttggaggatattgccaagggacaacttcactcctatttataaccgtaacttcaagtggtctaacagaatccgtatttccaatctttcctgatatagtcattagtctttctgttagtttttttcgagttaattgaggtaaactatgattcacgacgactagaacatctacatcgctgttaatgcgtaaaccaccatttactgctgaaccaaatagatatactccaactattgaacttccaaataaatcttttacgatttttaatgtttgaatcgcttgatttggtatttttccgttaatcaaattgctcatgatttcacctcgttgattatgttcatataaagtttatattgatactcaatttacttaccctagattggacatatacttaaattactgttcaataaagctgaccgttagcgtttaagtacatcctttcacaatttgtctacagattaataattattctttattatacagatctccatataatttttgaatttggttctgtaattttttattttctttttctaattccattactcttctttttaaggttttaataaggatttcctccgaacgagaacttttcttgggttttgagactacatttgctgttatttgacgctcacgaagggattcgattctttgcctaatatcgtgttccttataaagccatgatttagaaacattagcttcctttgctattgaattaaaattaataactttaccttcaatcgaaaatttagaaatcgctttgtctactttttcccttgtcttttttgatttctgcttcgccaaacgtacaatttctgttgtatttctaacttgtttatccattgataattaccccgtcaaacttccaatgatttgttctaaacgctctttaacacggctattagtctctacttgtctttgccattgtttatccttagctatggctaataactcttctgtacgctctaactgttcttcgtgctgtggtaagaattgcttactggtacagaagtgagtgcaatctaagcatgcattcgcatgtggacaaccacctgctactactggcaatctacaataaccatttggaagcacttgtgcatttatatttttcttgaaccattgaagctctacatcatcgacttcattatcttcatctagatcaagcacatctccattattggtaaccagtttttcctgaaatttagtaaattcattttttagagtttcatcaaagatatgagcgtatctgcttgtcatttctgggctttcatgccccaaaaatttctgcacaatatgctggggcatcccgttgttaatcattcttgttcctactgtatggcgaaaggcatgggcatggaatctataaatctcacctgatttatccactatattttgctcataagctaatttatttaactcacctctaaatgtttcttgttttaatggcgatccatcttttcttggaaagaggtattcactatctggaaattcctctgaaactttatcttcccgaactttaataagtaaagctacctctttagatattggaactatatgctcctttttcattttccattgataatactttaaaaagaaatctccatctttgtcctctaatagacagccttttttcaaggtgcacaattcacttatcctcattccacattcttgaacaatcatagtcatcgtagctatatattcgggtaatttatcaagatgactgttcaattgctctaggacgaattcatctataaagcgtggttttgctcttggtattttcggatagtcctcagaataaattaatattttggaaggaacatcatcccattctagcctaagaagggtactaaatagtccttccaatatagagatcctcccagttattgtactaggttttattcccatcatgtttagttcacttaaatatgcttcaatttccactctcgttaattggtgtactctctgaacttgtttaaatttcatgtccagaaaattaaagaactctttaagtctttgggcaatatcacttacataggaaaagctatccacgttcaatctcaacttacaatatctttttacaagttgtttaaaatatgtattccgaaaccctttaaagttaattgtatattcatattgtgttgggttaaccttatcatctggcaaaggtaagttacgtctatcccaaacgtctttatcccactcctctccatcaaaataaaagttctcataaaactccataaattgttttagattagtaacatagtaggaattagcttttacaggtgttttttcttgattagcagtaatcttataattagtagtggtaattctaacaccccgttttgtcaaataagttctatactccgtcattgctttttcaataggaacttcagtaattgaagtaatgctaggatactttaaatctaagaaatctaacattttattaattactgttccttttctaatccagacagtttttgcattccatattccattgtttaaatggtaaaaataaaaatatttcaattctgttcttaaccacagatttttaacacgttcaaaacgaacccaacgattccttaaagcaggattcttacttaattctatggcagaaggatgtggacattttcttatatcccaactattattagcccaaaacccctgcatttcttcattcattacagctatttttttgctaatctcactctgactaataattttccttttactagaagcattcatttcttatgctcctttctctcgaggtatttattaaactcatttttcatatcctgatctgaaagatgaacataggtatttaacgttgtctgaacatgtgcgtgacctaatctcttttgaacgaacgcaacatcccatccttccctaattagctgcgttgcgtgagtgtggcgaagcatatgtgatgtaaattctattccagtccttttaactattcttctaactagatcaagaacactttggtactttagtggtttcccaaaatagccttcttttaaggaaataaaaacataatcatgctccaattcctcactatactcatatatcaagtaatctgtataaagtgacataagttctttactcacatgtattgttctttccttccttaatttaatataagcttcattaacattaacatctctaggtgttaaatggatttgattgtcccaagtgacaatatcttcaagcctaagcgataacacttcaccgattcttaaaccaccctcatacataagcattaaaattaatttatctcttttcgtatgacaagcatcaataatttgcttaacttcctttgatctcaatgttcttatctgtttctttttaacccttaactttaagacattcttttggtatctacccttattaacatgatgtaaaaatcctttgaaatttcttccctttgcttgtttaaatacatcaattgatttaaattctcctaatctacttaaataatcaagaaaactcataactacatttaaaattgtattcactgtcgtttcttctcttatggctttttttgactgaagatcaattacatttgatgctgaaggatatctcaaccaacctacgaagtctgctaacaactcaaagttaatatcattaagaataacacctctctgttccatgaactcgtacagcaactttaaatgatagcagtatgccttaatggtattaggagacttaccagtattatctaagtatttaataaatttcattactggttctattagctggtattctttatctagtaataaatacaatggatacggcttattctccacttctatcctttgaaccttcacatgttcccacctctttaaatactttaactactacaaattataaaccttgttaatttttatttaaagtaaaatatccctttaatatctcctcttaaactactttaactactattatttattatactatggttaatacatcaccggatggatgattatgaactgcgatgattgcattggcattttctctcaccgcaatactaaaaatttcacgtggatgtacaatcgaactatttaatgtacctttaaaaacacaggtttctttaatcactacattttttgaatttaacaataaaatgacaaaatgttcttgtgttaaatctttcattgttggaatcatataatcagcaacatcacttggttgcgttatttttatacgattattttcagctcttctccccatcctttcccctaactcaaatgctgcttttaaagtaattgctttttgtaatccaatccctttaacttttatcaaatcgttaattgaagattttttcaattcattcagattcgaagcagatttaagcagttcattactaatgtctatgctcgagaatccttttcttccggtgttaattaatatagctaataattctgtattcgaaagactttttgcaccatggcttaacaaacgttctcttggcatttctgaagttaccatttctttaattttcaaaaatatacgcctcctaaaaattgatggatatcattataaaaaagtgaattgataaaaaaggaaataaatataaatggaacaaggggtaatagtttaatcggcttaaatatcatggtaattaaagcaactaaaccagcaatgacaaatgtaaataaaatgacataaatagtgaattggagagggaaaaacaaagaaagtgcagatattagtaaaacgtcaccataaccaatatatgcccgaaataaaaagtagaatatatgcgtggtcatactaataatgataaaagctactggataaatcatacttaacgagagagaaacgatacaataaattataattaagcgacaatctaacattaaagaagtgatatcggtcatagtaaaaataagcagaaaaacatatgtagttataaatagcgtagcatttacgtatgtgaaatcatacttaataaagacgataggtattaaagcaaaggtttcccctaagaaatgtgttagggaaatacgctttcgacagtttcgacatcgcccttttaataataaaaaactaataatcggcattaattcataccatttgagtgacgaattacaataatcacatttcgatcttctatgtaaataatcaaatgacgtttcttctatagatataaattgatatagaaaactaaaaatacaactgcaactataagataacaatactaccaaatgacaacctccttatgtaaattatagttagttattaccaaaatgtaaatatacactatttttcaagaattgaaccgctttttcatttaaatttttcaatattgctaagcataattgatggatactttaacaacccattactgctcggcaaaattaataatggcaagaaattgaaccttataaacacatacgatttagagcataaaaaataaccatgaagctctacctattgattaaatagattcttcatggctattttagttttagttttataatgcttcaaagtctaattttgatttaacttcacttatgaaatacagactaccggtaattactaatgtatcaccttgataattttttataaattcaacgtagtcatctactaattgtatttcatcattttcaatactacctacaatttcttctttgcgtaacgctttcggaaaatcaaattcagttgcataaaacgtatgcgcaattaaacttaaatgtttgaccatctcgttaatcggttttccgtttattgctgagaacaaaatatctactttttctttatcatggtactgtttaattgtatcaattagagcatctatactctctgaattatgtgcgccatccaaaatgattaaaggtttgtcatgcacctgctcaatacgtccagtccaacgaactgattcaataccgtctatcatcttattgaaatctaattcaattaatccttgttcatttaattcaataagagctgttatggctaatgcagcattttgtttctgatgttcacctaacatgcttaaaatgattgtttctaattcataatctttataacggtaagtaaattcatcattttgcgatacaacaacaatttctctatctaattcaattggctttgcatgttgttcaattgcgcgttcacgaacatattttaatgcatcttcatttttaacagcatatatcactggaacgttaggctttataatcgcgcctttatccctagcaatatctagataagtaccacctaaaatatctgtatggtctagaccgatactagttaagattgataaaaccggtgtaaagacatttgtcgaatcgttctttatacccaatccagcctcaacaatgacaaaatcaacaggatgtatttcaccaaaatataaaaacatcatcgctgtgattatttcgaattcagttgcaacacctaaatctgtttcacgttccatcatttcacttactggtttaatacgtgatactaattctacaatagcgtcatttgatattggcacaccatttagactaattcgttcattaaatgtttcaataaacggcgacgtaaatgtacctacttcataaccattttcaactaaagctgttctaaggtaagcaactgtagagcctttaccatttgtgccacctacatgaatacccttaatgttattttgaggattattaaattgtgctagcatccattccatacgtttaacacctggtttgatgccaaatttagttctttcgtgtatccaatacaagctctctaggtaattcattgttactaactcctatgcttttaattgttcaattcttgccttcacaccatcatatttttcttgataatcttgttttttacgtttttcttcatttataaccttttcaggtgctttacttacaaagttttcattagagagctttttatctactctatctaattcgctttgaagtttagctaattctttttccaaacggctgatttccttatccatatcaattagcccttctaatggtaataccactttacctgcaattacaactgatgtcattgctttctcaggaatttccacgtcagtgctaatatttaaggtactaggattacagaatttgattaaataatctttgttttgtgataaagttgtttcaatttctttatctttagcttgaattaaaataggtatttctttagacaatggcgtatttacttctacacgtgattgtcttacagatttaatgatttcaacaagttgttgcattgtttgtttactttcttcaaaaatcaatgattcacgcacttctggccatgaagctttaacaattgtgtcaccttcatgtggtaaactttgccatattttctctgttacaaatggcatgaatggatgtagcattctcataatattgtctaaagtataactcaatactgaacgtgtaacttgtttttgttcttcatcattactattcattggaattttactcatttcaatgtaccaatcacagaaatcatcccaaatgaaattatataatgcacgtccaacttcgccgaattcatatttgtcacttaaatcagtaactgttgcaatcgtttcatttaaacgtgttagaatccatttatctgctaatgataagttaccacttaaatcgatatcttcaactttaaagtcttcaccgatattcattaaactgaaacgtgccccattccagattttattgataaagttccacactgactcaactttttcagttgagtatcttaaatcatgtcctggagatgaacctgttgctaagaagtaacgcaagctatcagcaccgtattcgtcaataacatccattggatccacaccattacctaatgatttactcatcttacgcccgtcttcagcacgaactaaaccgtgtaataatacatcattaaatggacgacgatctgtaaattctaagccttggaatatcatgcgtgctacccagaaaaagataatatcgtaacctgtaactaaggcatttgttgggtagtatcgtttaaagtcttcactttctaaatcaggccaacctaacgtagagaaaggccataaagcacttgagaaccacgtatctaatacatcttcatcttgttgccaattttcaatatcagttggcgcttcttctccaacatatatttcgcctgtttctttatgataccaagccggaatttgatgaccccaccataattgtcttgaaatcgtccaatctctaatattttccatccattggttaaatgtatgttcgaaacgttgcggataaaaatcaatacgatcatctgttttttggttatctaatgaacgtttcgctaagtcttccatgcgcacaaaccattgtgttgataaatatggttcaacaacagcgccagatcgttctgaatgacctacagaatgaacatgatcttcaatcttgataactaaatcttgttcttttaaatctttaactagctgtttacgacaatcaaaacggtccataccttcatatttacccgctttgtcgttcattttaccattttcatccataacgataatattttctaattgatgtctttgaccaatttcaaaatcattagggtcatgtgctggtgtcactttcatagcaccagaaccgaagtctatatcaacatactcatctgctaaaataggcagttcgcgtcctacgattggtaatataacagttttaccgattacatctttgtatcgttcgtcattagggttaacaacaatcgctgtatcacctaacatcgtttctggtcttgttgttgcaatttcaataaaaccttcaccatcagcgtaaggatatttaaaatgataaaacgcaccttgaacatcttcatgtattacttcaatatcagataaagctgtacgtgctttaggatcccaatttataatacgttcgccacgataaataattcctttattgtataaatcaacaaaaacttttttaactgctttacttaaaccttcatctaaagtaaaacgttctctactataatctaaacctagacctaatttagcccattgcgcacgaataaatgacgcatactcttctttccaatcccatgcctgttctaaaaacttttcacgaccaagatcatatctagttattccttgttcatttaatttagcttctacctttgcctgtgtcgcaataccagcatgatccatacctggtaagtataacgtatcgtatccttgcatacgtttcatacgtgtaatgatatcttgtaaagtcgtatcccatgcatgtcctaaatgtaatttaccagttacatttggtggcgggataacaattgtatatgtttcttttgatttatcttctgacggtttaaaataaccattctttacccattcttcataacgtcccgcttcaacttcacgaggatcatattttggtttcatttccatttgctatacctcctaaaaaaataaaaatatccatcctatatacaaataggacggatattccgtggtaccacctatattcaagaaggatgattaatatcaaattcactcttttaacataattggaataatcataccaatactatcatcgtgaaatttgaaatgcttcatctcttcaagcactctagattatgattaacgctcaaacacgtcttagcctactattaatcacgttcagctaagatactctgtgggctaccttcagtaaaaatcatttacatactcacaccaaatcatatgctctctttaaaataatttgaacttactcttcccaaatcctatattaaactcttaacttatagtataatgattgacaaaataagtcaatgtataggtgggaataaaatgaatgaatgcgcatttggtactaaagatccagtctacttagactatcatgatcatgtatggggacaaccgctctatgatagcaaggcattgtttaaacttttagcattagaatcacaacatgctgggctatcttggttaactattttaaaaaagaaagaagcctatgaagaagcattttatgatttcgaaccagaaaaggtagcacaaatgaccgctcaagatatcgaccgcttaatgacttttccaaatatcgttcatcatcgtaaaaaattagaagcaattgttaatcaagctcaagggtatttaaaaattgaacaagcatatggtagttttagtaaatttttatggtcatatgtaaatggtaagcctaaagatttgcagtatgaacatgcttctgatcgtatcacagttgatgatactgcaacacaactatctaaagatttaaaacaatacgggtttaaatttttaggtccagtaacagtattttcgtttttagaagcagccggtttatatgatgcacatttacaagattgtccatcaaagcctaaacataattaatttgctatagcatcataaagtaaacgagacatcatctatttttaactaatagactgtctcgttttttaatgtgaaaatttattcaaatcataagttaaagttccaagttaatgctctgctaatattagatatcttaatctaaaaatagatgtacaacctttgcttaaaccttaataatgaattctatcctaagcataattcaacttagatggatgatagtttctaatcttcacgcttattcgaacgatattttaaaaagtaattaattcctggtgcaataataaataggatgaaaaagattcggaaaatatgataactcgtaatcatagcaacatcggcaccagtagctaatgcaactaaaactatctgattaacccctcctggtgctgcaccaagaaacaattcattaataggattattatcaaagaaatgtatgatataaaccatgattagcgcaccaattatcaacataatattttgaattgtaattgcgattgctagtctaccttttaaatctgacaataaatgcgcaatttgaactccaattctaatcatatatattagttgtgccatgttcaacaaccaatgatctagtgtaaatgttaaacctgtagaaaaattccaaacaattaatacaatgagtggtgctaataattgaaatgttggaaactttattttagacataattagataaactataaagatagctatcgctaaaataactatttgccctatgtttaatacttgtgataaaggcaagacttttgttaactttccattcgcatgcatgttaccatcatgaaaaaaatatgaaatgaacggtactaaaacaacaacaaatataattcgtgatgtttgcgttaagctaacaactaacaaattagcacgtttgtcttgttcagccatgaccagcatttgtgttagtgctcctggtataacacttaaaatagctgtttctgtattaatacgtgcaatttttttaaaaacaaatgccattactattgcaattaataatatcgaaatagatacaacaataatcgaaagccaattgtttttaatatccataacgacatttttcgtaaacgttgatccgatttgcacacctaatagtacaatacctaattcactaagtaagaatggccatttaatatcaagtttgaaaacttttacacaaatgattgatgcgataataggaccaaacataaatggaagtaatacgtgcgatgaatacagtagaatactaataaaaaatgataaaacgaacacaatgaaattatttctatatatcattgccatgttttccacttctttcaataaaaaataaaatgactaaattgctgcttgagcttcacgtttgttaagataacaatatccgctagcagttttgactacaaagcatatatggactttcactatcaagtcgccgcccatgccttatatacatttaaaaagagcctgaacaaagttcaggctctcaatttgtccgtatatttattttacaatacgacttaaagccgtatcaaatgcttgaatcgttttttcaatatcttctttcgtgtgtgccgtagataagaatgtaccttcaaattgagatggtggtaaaaacacaccttcttttgccatttctcgatacatttctgcaaataatttcaaatcacttttattcgcttgttcaaaattagttacaggtccttcatttaagaaataaccaatcattgaacctgctctatttacagttattggtacattgtgtttagcaaatacacgttttaaaccgtcttcaagtatatcgcctaacatattaaaatactcatatgtctctggcgttaattggcttaacgtttcataaccacttgtcattgcaagaggatttcctgataacgtacccgcttgataaatatttcctaatggtgctatatgatccatgatttcttttttaccaccaaatgcacctacaggtagtcctccaccgataacttttcctaagcaagttaaatctggtgtcacaccaaagtaaccttgtgcacaatgataaccgactctgaaaccagtcattacttcatcgaaaattagcaatgcgccgtattcagtcgtaatatctcttaatccctgtaaaaaaccttcaatcggcggtacgacacccatattaccagcaacaggttctacgattacaccagcaatatcgtttccaaatttttcgaaagcgattttaagtgcatctaaatcattgtatggaactgtaattgtatttttagcaataccttcaggcacaccaggagaatccggcaatcctaatgttgccaccccagaaccagctttgattaataacgaatcactatgaccatgatagcaaccttcaaatttcacaattttatttctgccagtataaccacgtgctaatcttaaagtatccaatgtagcttctgtaccagatgacaccatacgcactttttctattgaaggtactcggtcaataacgagctgcgccaatttattttcaagtaatgttgatgcaccaaaacttgtacctttatcaattgcttcatgtaaatgactaataacttgagggtctctatgtcctaaaataagtggtccccaacttagtacatagtcgatatactcgttaccatcgatatcataaatttttgaacctttaccgtgatccataaaaattgctggtgtatctactgatttaaatgcgcgtactggactatttacaccaccaggcattaaagtttcagcaaccttcattgcttcttctgatttcgtatatctcataaagtaaattcctcctacagtttatggaaaatcataaatataaaaccttatttatctaaatagcgacaaatgtcctttgcaaaatacgtaataatcatatcagcacctgcacgtttcattgaaaccatttgttccataacgacacgttcttcatctatccaaccattttgtgccgctgctttagtcatactatattctccactcacattatatgcaacaactggaacattcgtatgatttttaacatctcgaactatatctaaataacttagagcaggtttaacaatcatcatgtcgcacccttctttaagatcactttctaattcacgaagtgcttccaaacggttagcagggtccatctgatacgtttttctatccccaaatgatggcgctgaatctgctgcatctctaaaaggtccaaagaaacttgatgcatacttgacaccataactcattataggaatattgtaatagccggcttcatctaatccacgacgaatttcagcaacaaaaccatccatcatattacttggcgcaataatatcagcaccagcttccacttgagaaattgctgttttaacaagtagtggcaatgatttatcattgtcaacgtcatgtgtatggtcatcaatcacgccacaatgaccatgatcagtatattcacataaacaagtgtctgcaacaattaataagtcatcatacatttttttagcaatacgtgttgcctgttgaataacaccatcgtgaatgtatgcaccagtacctatatcatcttttgagtttggaacaccgaaaaacataatggcacgtatgcctaagtcataagcttcttttaattcactttcaagtaaattcaaactgatttggtatacacctggcaatgacttaatttcttttttcacatcgtctttttcaactacaaaaattggatatattaaatcttcttttcttacatgattctctctaaccatatctctcattgtcgctgatgatctcaatcttctatgtctatcaaatttcatttttagcccctactttctaaaatcttttcaattagtgattcgagtgtttgaatttctgcaattgttactggttgttgatatgatttaatggtccgtgctgtttgttctccaatagcaaaatacgacttgaattttggtacaaatccttcattaaaataataacgtactgccgacgaacttgaaaatgttaatgcatcgatttgttgatgttctatcatttctttaacatcttgtatattttgtttgttaggcactgaagtatataaatctattttaacaacttcattatctttagataacgctgctaataacaatggtctcgccaattcactcgaaggcaaaagtattttttggttagtttgattaaatgattttaaaaatccttcttgagaaaagtcgtttggcataaaatcaactcgaatgccaagtgattcacaatattgcgctgtcttacttcctatcacagcaatgttatcaacattaattccttttagatatttataaaagaatttcacagcatttttagatgaaaaaataagccagtcatagcgttgatttaacaaatgaatatcaaaatttagtggctttatatcaataaagggtttgtgaataattgatactaaatcactttgcatgtcatttgtttgtgtcataactacaactggcttcatatttaaacgtcactccattatttaatgttgttcatttaagcgttttataatttcataagcaccttgctcttttaatttgttactcactgttttgcctaactcaaccggatctgttccgttcattgtatattcaaatcgttctttaccatctggggtcataattaaacctgtaaattcgatttcgttttgatctgagattgtagcatatcctgcaattggcacctgacaactaccatccatttctgctaaaaacgttcgttcagcagtcacacattttgcaacctcatcattatgtactttgcttaataatgttaatagttcttcatcgtcactacgacattctatccctaaagcaccttgtccgattgcaggtaacaatgtatctctatcaagataagatgttacaatatcatctgaccagcccattcttcttaaaccagctgcagctaaaataatcgcatcataatcttcagtttgtaacttttctaatcgtgtatctatattacctctaatccattttatctctaaattaggatacttagataatatttgtgcaccacgacgtaatgaactagtaccaataatactgccttctggcaattgggatagtggtgtatgtgttttagaaatatacgcatcaaaaggtaattctctatcagggatacaacctaatgttaaaccttccggaattacacttggtacgtctttaagcgagtgtattgccatatcgatatttttttcaaaaagttcatgttgtatttctttaacaaataagcctttgcctccgactttagacaattgtttatctactatacgatcgcctttcgtgacaatttctttaatttcaatttctagatttggctcgacagcttttaatttatcaataaattgctggctttgtgttaaagctaatttacttcttctggagccaacgactaatttacgcatgttcaattcctcctaggaacggattgctctagattattttctcaattcacaaaatgtgttgcaaaaaataaattaatcatatttaagcaaaataaaataatgttatagtatattaaatatcttgaattcaaccatttgttgattctaagtaaaatataacttccatataatactgtaataattgaagagagtattaccttcgggtcaatgaatatacgttcaccaactgaaattacaccccactgtgtacctaaaataatactaaatatgagaattatccacccacttaacgttgagtaaaacacaattgattcaagtgtagcaacgctaccaattctaaagtatttttgatcaaaacgtttttccttcaaattacggtattgcatgatatacagtaatgcattgacaaaagctaaggcaaagaagacataacttaacacagctagaccgatatggactaacagtaactcgtctacaacagcaattttctgaaccttattagtataatgtgtcggttgaaatgtattcatccctaaaagtgttaaccctattaaattcaagaaaaacacagagaaattcaaaactttgataaggttaagaattaaagagattgaaataatcagccaacttaaagtatagaatacatctgaaatagaccctaatggaatatgtctagtttgtataataaaaatagataaagagattgtttgtaaaacccaaacaatccccaataaatatatgcctaaacttctaatcttatgacttttttgtacaaaatcataaaaatagcaaatgatactgattaagtatattaataatataatttcattgaatcgaataaacaggttttcttgcatattatcaccatattaatatgcttattcaaaactaaagatacgtcgcgctgaaatttccttgaccttgctttctttttgttgcttcgcttgctcatgaggacattcagcttcgatatcaaatatattttgaaatagctctaatttttcattacttttcttatcactacttaattctttggcctgtttaataggatctttcaacatttgattgatgatactttttgtatgtttagatataattttacgttctctttcgcttaaccctggcaatttacgatcaatactgtccatcgtttctgcttgaattgccatagctttttcacgtaaagctctaatcactggaacaacacccaacatactaatccactcattgtgtgcatgtatttctgcaggaatttgttccgaaattgttgcagccgctaattgtcgctcacgtaagtttgcatcaactaaaccttttaagtcatcaacatcataattaaagatgtttgtgatggcactaataccaggttcaatatctcgaggaactgcaatatcaatcaatactagtgaatcttgctttctattttctgcaattctttctatcatttcatttgtaatgatataagattgtgcactcgttgaactaatcacaatatctgcactttcaagtaaatttggtaatgatgatagttcatcatatttcacttgatgctttgctgctaatttcatagcattttcaattgttctatttactactgtaatatcagtaattccagaaccaagaagatttaatagtgataattcactcatttcccctgcaccaataatgatagcttgcttacttttcaatttgccaaatacttttttcgccaactcgaccgcagcataagacacacttacagcattatcagctatatctgtttcattatgtgctctttttgcaaaagtaattgcctgtttaaatagatgattaaaaattgttcctgtcgtacctgtgctttgcgctaagaaaaatgcatctcttatttgacctaaaatttgagtttctccaagtacgattgaatctaaaccagaagtgacacgcaataaatgttctactgcttcgtcccccacttttacttctgacattgctttaatatcatctacttcaaatccaaatgcacgagctagaaatcgttgaatatagtaacgacctgtgtgaatttgatcaacaacagcatatacttcagttcgattacatgttgataatatgacattttctaaaatagatttagtttcatataaatcttcatgggcaattcgtaaggcatcatctctaaaagcaacttgctctcttagtgcaacatcagctgtgcgatgatttatactaattgcaataaaatgcatttgaaacgcccccatatatactaacaatacaaatattataacataatttaaaatccaattaagtacgatgcttaaataaattataatctttctaatttacttttgagtttttgacaaaatgatgaacgttgaaaaatgttatcaattgtgtactaattaaaagtttcgtgcttacattatttttaaaatttttgtataagttttgacgtacaaaaactatgaaatatacggttcaattaaattccatatttgttgttgtttattattttgaattgatgaataacttacaattgtatcgtctgggtccatatctaattgtgtcttaatatttttaatatgcttttgaaccttaccttttggaattttgtcttctttagtgcatataactaaagtaggaatatcaaaatgtttcaaataattgtacattaagatatcatcttgtgttggatcatgtcttaaatcaactaattgaataactaattgcaaattctctctcttagttatatattcctcaatcattttcccaaatttttcacgttgtgttttacttactttagcatatccataccctggaacatccacaaaaataagttgttcatctatattataaaaatttaacgtttgcgttttgccgggttgctgtgatgtacgtgccatattttttctgccaatcatactattgataaatgtagacttacctacattagatcgaccgctcagtgcaacttcagacaattctgtttctggatattgttcttcttttactgcactaatgattaattctatattattaggattaactttcattttatatcctcacttttttatattctctttcaattctaccattatataatatttgaacctttcggtatacattataaaaaagctccgatcaaagttaaactatttgagcgtcaactttgattggagcttttcacttttataacacatcaatgattaagctgatgttttactattattaattaaattgccttctgcgtcgtatagttctggttcagtttcttcattaattgtttgtgctgtaataactaccttcgttacattttcgttagaaggcacatcaaacataatatcgattaacgattcttctatgattgaacgtaaaccacgcgcacctgtttttctttcaattgctttttcactaattgctgataaagcttcttcagtgaactctaaatccacatcatctaattccagcattttagtatattgtttcacaagtgcatttttaggttgcgttaagatgtttttcaacgcagttacatctaatgtttctaaattagctacaattggcacacgtccgataaattcaggaatcaaaccataggcttgcaaatcttctgggcgaatttgtgctaataatgcttgttcgtcatatttatcagcttcattgcttgagaaaccaataactttttcaccaagacggcgcttaatcacttcttcaataccatcaaaggcaccaccaagaataaataagatatttgttgtatcaatttgaatcatttcttggtttggatgtttgcgtccaccttgtggcggaacacttgcagtcgtaccttctaagattttaagcaatgcttgttgaacaccttcacctgaaacgtcacgtgttatagatgtgttttcagatttacgtgcaattttatcaatttcatctacataaataatacctttttcggctttatcaatgtcaaagtcagctgcttgaattaatctcaacaagatattttcaacatcatcgcctacataaccagcttcagttaaacttgtcgcatctgcaattgcaaatggtacattcaacgtcttggctaaggtttgagctaataatgttttaccactacctgttggcccaattaatgcaatgttacttttttgtaattcaacatcatcttcttttggtcctaattgttgaatacgcttatagtggttataaacagctacagctaaagattttttagctttttcttgaccaataacatattcgtttaaatgatccataatttctttaggagtaggtaattctgtcatcgcttcagaagtgttttgagctaattcttcttcgacgatttctgagcataattcaatacactcattacaaatatatacaccacttcctgctacaagtttttttacttgatcttggtcttttccgcagaaagagcatttcaaattttcttcatcttcattgaatttaaacattctttttacacccctattcgttaaagactatactagattggatgttacaatgcaacatattaacatacaaactttttgcttaaagaatagtagcagatacataagctatgcatctgctactcatttttgtaatttaatatttaatgaagattaatcttctttagttccttcaacgaactttgcgttatctcttaataaatcgataactttttggatacgaacatcatttttaatgatatcagtattacctaaagtatttttgatatcttcaactgagatattaaattgtttactcattttttctaattctttatcgatatcttcatcagtagcttcgattttttcagcttcagcgatcgcagttaaagttaagttagttttaacacgttgttctgcatcgtctttcatttgctctcttaattgagtttcatcttgacctgagatttggaagtacgtttgtaaatctaaaccttgttgttgaattctttgtgcaaattcagacaccatacgatctaattcagtattaaccattgcttcaggaatatcgattgttgtattatcagtagcttttgtaatcgcttcttctttttcaacattttcagcatctgtagctttttgttcagctaaacgtttacgtaagttttctttgtactcgtctactgtatttgcttctgcatctaattcattagcaatttcatctgttaattctgggacttctttaaatttaatttcgttaacttttgttttgaaagttgcttctttaccggctaattcttcagcatggtattcttctgggaatgttacgacaacatctttttcttcgtcaactttcataccttctaattgctcttcgaaaccaggtatgaatgaacctgaaccgatttctaaatcgtaaccttcagcttgtccaccttcgaattcttctccgtcaactgaaccactaaagtcgatgttaactgtgtcgccattttcaacaacaccatcttctttaacgaccatttcagctaaatgtcctaagctgtggtcaatcgcttcttgtaactcatcatcagataattcagtttcttgtttttcaatttcaagacctttatagtctcctaatttaacttctggctcaactgtaactgttgcttcaaaaatgaaatctttacctttttcaatttgagtaacacttacttctggttgtgcaactggtttaatatcagtttcgtcaattgcttcaccataagcatctggtaataaaatgtcgatagcatcttgatataatgcttctacaccaaagcgttgttcaaaaattggacgtggcactttacctttacggaatccaggtacgttaatttgtttaaccacttttttgaatgcttgatctaacgctttgtttactttttctgcaggaacagtaacagttaataaaccttcgttaccttcctttttttcccaagttgctgtcatgtatatatacctccatgattaactaatttattttttcaacttccctattatatcataggtctattccctatacaaacattgaaatcacaacgtttatatatttgtaaatcaacttttttcgtcaaaactatattaaaatgctgagtattattttgcaacaatttaactattattattcaaatctaattgctgaataaaattaaatgcatcgatactttgtaattcacatttaagtcctaacatatttttgaaataacattcgtatgcattaatccatttattcgtttcaaacaaagtttcaatatcaattggataaatcatgatagagtgattattcataatatggtgtgcttcttcagcgatatgtaaagcaccatcatttaatgtttccataacgttaggtataactttttctttaagtgttgtatgttctagcccttttaaattagctggtacaaaagttacatccataccatacttttcaattgtcagttcttgtgtacaatttgcgaaccttaaatactcaatcattaaactaatgaggttataactgtacgtattagattttaatatatataataccgtttcttgaaattgaaaatgaccattgtctattaacttcaaaatcaagtgcgtctgttccctcattgataacgtatcaaaatcagctaatgactgagtcaatcgtttttcatcttcaattaattttgacttagcaaattctttaagaggatgtaatgccattcttgttttgtgatctttgacttcatcaataatttgatgaattacttctaccgcttcaaaatattgtcccaaaccaatcaaacttttcacgtaataaatcatcaatgcatcatattgttgtatgccagttttcaataagacaattgtttcttctcttaattcaagaaatgaccccgtctcatataacatacggcatttcatcattgctatttcttcagtgagttcaaattgacgttcatattgcacaatatattcatacatcaggtcatagttttggtcttgttcagcacgttttatatctttatataactttttcgaagagttaggaaactgaataatatctgacatatatgtcacctcgtttgattataaatcttgaaggattaatgcactccacgtttcgaaatcatcatatgactctatgttgcctttttcaacccattttattcgtaaagtatctgtttctttagcttctacatcattcgtacttacagtgattttaaatacaacaccaatatgtaccttgcccacttcattattatcgtcattaataaaaccgatatattccatattttgtgaatcttgctcacttaaacctacttcttcttctaattctctctgtgcattaactctcaatacttcgttaatagattctgctcctggaacatcattcatatgaccgcctacacctattgaagattgtccatgcaatcgagcttctccaccgccagataatcgttcatacactaatatctcgccatgctcattttcaagtaaacaataagaaatgagttgtttatatgatggatcctcttccatatcgccgcgtcgcttaacttcatattgacttagcgcatcaaaaatattttgaccttctggtttattcttatttaaaaacccattgaaagtattcttttcattattaaaaataatttctctaggtactacaatgatttgttcatcaaatttagacatcgtataaaactcctcactttaatgtttgttctcttaaatgcattttagcaaatatgtcatattttagcgattaaatgtggcattttgctatttaaaaaataaaaaagagatgacaatgccatctcttttttataagtgttattattttaaagcatctttagctttagttactaattgagcaaatgctttttcgtcagaaattgcgatttctgataacattttacggttaatgtcgataccagcttttttcaaaccgttcattaaacgtgagtagctcatttcatgttgacgagctgctgcgttgatacgtgtaatccataatttacggaagtcacgtttacgttgacgacggtcacggaaagcatattgacctgatttcattacttgttgcttagctactttgtataatgtatgttttgaaccgaagtaacctttagctaatttaatcgtttttttacgacgcgctcttgttactgttccacctttaactcgtggcataaaaaattcctccttaggtaattcctaccgatttctgtatttgttcttattttttgtatgctaataattgttttacacgtttcatatcgctcttagacactaatctagctttacgtaattgacgtttttgtttagtgctcttgtttgcgaataagtgagatgtgaaagctcttgaacgttttaattgacctgaagcagttcttttaacacgtttagctgctccgcggtgagttttcatttttggcataatataagtcctcctgtaatagctttaattatttttcagctgttggcgctaacatgataaacatttgacgcccgtccattttaggtttttgttcaactgttgctatatctttgcattcatctgcatatttttctagcacacgttgaccaatttccttatgcgtaatggcacgccctctgaaacgaatagatactttacatttatcgcctttagttaagaatttacgtccgtttttcaacttcgtttggaaatcatgttcctcaattgttggacttaaacgaatttctttaacattgataattttttgtttctttttcatttctttttcttttttctgttgttcgaatttgaatttaccgtaatccataattcttgcaactggtggtttcgcattcggtgcaacgaccactaagtctaaatctacacgttcagccatttctaaagcttcacgctttgatttaacaccaatttgttcaccatcttgaccgattaaacgtaattcttttgcacgaattttgtcattgatttgagtttgatcttttgctatggttgacacctccaaaatttttacgaaatttgcaccaagcaaaaaggaagagcaggtataaaatacccgctcttccttatacacagttatgtgtaatgtgattaacctgccaactgctttatgcgtcgctacaggtgagaagcgggtgcttctacttggttcgtttcgtattcaacgttattaatcatatcaacaattcacatttaagtcaacactataactgtaattatttttattttaaccttttatttcatccattgacacgtcttgacgtaaatctacttgttctaatggaatttttttcgttttatatcgaagcttatgataaataaagaatgctaaaaatactggaattcccatatacgtaattaagaagcgactaaaattaaaatctcctgttttaataaagtcaacatcttgaccaataattactacaatacataaaaagccagcaaataatggtccgaatgggaataatttagcagtatattttaatttagatttgtcataattttgtttatcaaatgctcttctaaatcgataatgacttactgctatacctacccaagcaataaaaccagttaaaccacttgctgcaacgatatattcgtatgcaccttttgtaaggctttgtaatacgaaaattatcactacaatgattgctgtaacgagtaacgacatatatggcacaccgtttttatttgttttaccaaatgcttcaaacgctaatttatctttactcattgaatatagcattcgagttgaagcatacatacctgagttacctgctgataacacagacgttaaaatgactgcattcataaatgatgctgcaaacgcaaatccagcatttttaaacactaatgtgaatggagacgttgctacattatcactaccccccattaatgcactactatcataaggaattaacataccgataacaaaaatggctaaaatgtaaaataataaaattctccagaatacttgtttaattgctttcggcacagcacgttcaggattttctgattcaccagccgtaataccaattaactcagtaccttggaatgagaaaccagcgattaagaatacacctagaattgataacaaacttcctcctaagttgccaccaagaattggaccttcacctttattaaatatttcgaatcctacaacatgaccacccatgattccgacaatcgttaataaaccaattgcaatgaaaacaataactgtaaccacttttatcaatgccaaccagtattcactttcaccatagacgcgaactgataacgaattcagactaaaaattataactaagaacaacgcactccatgcccaagcgggtatgccttgcaatggtgtccaatattgaatgacttgtgctgcaatcgtaatatctgctgctacagtcactacccagttaaaccaatagttccaaccaagcgcaaaccctaaagatggatcaacaaatcttgtagcatatgtactaaatgaacctgatactggcaaatacgtagccatttcgccaagtgacgtcattaagaaaaataccattattccgataattgcgtatcctattaatgcacccaaagcacctgcatcatgaattgctccaccagaagttacaaataaacctgtaccaatacaacccccaatcgcaatcatagaaatatgacgatctttaagtccccttttgacaacattgttactttcattttgaacttttgacatataagctccctttccatgttttagaggccaagaaataaataacctttattcactttcatacccttttttacagaacatagtgatattaaaagtaaaaaagtggctacatacctttaagatatgcaaccactttggcaattatctatataaggtagcacatcacattctgtgacagtacagttcctattcgaaaactgtcccaatagatataatttatggtttatatctatttcggcatctttacctttcacttgttcaacttatgtaccataaatacttctgacaagttactaattaaacatgcaacctctaactcaatttaatattttaactaacttgtaatatacaggattcatcacgcataatcaaccctgtaaaacttgatacgcaataaaagttttaaagcattttattgcgacaactgtctatctatgttttttcaaacgaatttcatcaactagattccagataaattcatctttttcaactgtttcttggtcttgcgatccatattgacgcacattcacttgattattttcaacttccttatccccaactacgatttgataaggtattttttgcatttgagcttctctgattttataacccattttttcattacggtcatcaatacttacacgaacgccttgagatttcaattcatcttgtaattggcgcgcataatcataatgtaaatcaacgttaactggaatgatttgaacttgttttggcgctaaccaagttgggaatgcacctttagtttcttcagttaaaaatgctacaaatcgttccattgttgatacaacaccacgatgaataacaactggacgatgatgttcaccatcttgaccaatataagttaaatcaaaacgttctggtaataagaaatcaagttgtgctgttgataatgtctcttctttacccatcgctgttttaacttgaacatctagtttcggaccatagaatgccgcttcaccaatcgcttcttcgtacgataagccaagctcatccgctgcctctttaagcatattttcagctttattccacatatcatcatcatcaaagtacttttctttatcttcagggtctctataacttaatctaaagctataatcctcgaaaccaaagtctttatacacatcaataatcatgtttacaacgcgtttgaattcttctttaatttgatcaggtcgaacaaagatatgtgaatcatttaaagtcataccacgaacacgttgtaatcctgatacagcaccacttgcttcatatctatgcatcgttcctagctcagcgatacggataggtaattcacgatatgaatgtggtttattcgcataaatcatcatatgatgtggacagttcattggacgtaataccatagattcagtttcatctaactgcattggtgggaacatatcttcttgatagtgatcccagtgaccagatgttttgtataaatcaacattagcaagtactggtgtataaacgtggtcatatcccatgctaacttctttatcaacaatgtaacgttcaatttcacgtctaattgttgcaccgttaggtaaccataatggcaaaccagcaccaactaattggctatttgtgaatagttctaactctttaccaattttacgatgatcacgttctttacgctcttctaacatttgtaaatgtgctttcaattcttttttatcaaagaaagcagtaccgtatatacgttgtaacattttgttgttactatctccacgccagtatgcacctgctgtagataatagtttaaactctttaattttagctgttgatggaacgtgaactccacgacataaatcagtaaaatcaccttgactatataatgttacattttcatcttcaggaatcgcgtcgattaattctaatttgtattcatcattgctgaataactctttcgcttcatctcgtgaaaccacttttcgttcgattttcatattttcgttaacgatttgtttcattgttttttcaatttgttcaaagtcatcagatgagatgttttggtcaatgtcgaagtcatagtagaatccaccttctattacaggacctacaccaaatttaacattaccatataaccttttaatcgcgtgtgccattaaatgtgcagtagaatgacgtaatacctctaacgcttcttcactacctggtgtcacaatttcaattgatccatcagtttcaagcggtttagttaaatctacaagttgcccgttaaatttgccggcaacagcttttttacgtaatccaggactaattgattgtgctatatcttcagtagtagtacctttatcaaacgcctttttattaccatctggaaattgaatattaatttgttccatgttaaaccctcctatttgctttataaatacttttatctgacctcgttaaaaaattgaacaacaatcatcgttttaacattaaacctattaacaataaacagggaatttatgacaccaacaaacatttatgtctgaaaaaaacaaaaaatcccgcccctatacaagggacgagatcgtcgtggtaccaccctagttatctaatacaatttatgtattaaatatctctgcttaagataacggtcttgatccgggtattcattacaaataccataaatgaagtagtaatcatctaatttattaaccatattctcatcaaacaatggctttctgtgtaatattgattagatcatcttgtcttcaatcatttaaacgatttagatttgtattcattatacaccaatcattttaaaattcaattgtttctgaaattttctcctgataaaaagtatggtgttgacaaagatttgacacgttcaataatacgtgctgctttagtcttctcttcaccatcacgagtcatcgctaaatgatgttccaattcactatagtcaaaattagaactaaagaatgttggtaattcatgaaccattcgataatgtagcaaaggtccaattacctcatctctcacccatggagtcacttcttcagccccaatatcatcaagcattaaaatgtttgcttctcttacgcgatgtaatttcttttcaaaagaaccatctttaaagccaccttttaatgttctaataaattccggtaaataaataattgtcgaacgtaccttcttagatttgagctgattcgcaattgcacctagaataaaagatttacctgtcccaaatggaccataaaggtaaaggcctttcacttgttccccattagttattgctgtacaaatatcatctgctgccatagctacatcaagacggtctcgatgattcatataaatatctttcaatttggcatttaaagtatctcgttgcatatgatgagatgtaattagctcagcttcaaagcgttcttcgtcgtacttgattttacatgggcattgtaaatagcgtattttaattcggttattatcaacatataactcaggcacatgcccctttacgaaatttggacaatcagcaaatttatgaccgtcataatgtttttgttgatctttatactcttgtaacacatttaagtcttcatcaatcatagcattcgttaattcagctcgatgcgcttccaaaaattgcttaacatctgggtcattgattacttctttttttatcttttctattcttttttcaaagtcctgcgacgtgttaattatacttttaaattgcttcattattgactgtcctcctcccattttttagataatttatctagaaatgcttgtcgatcttgctctaattgttgatcatctacgctattatctttagccgaatcttcttcactaggtttatctctattttctaaccatttaggtgttttttcttttgaaatacgattacgctgcccatagtatgaaccacgcttttggtaatttccgctagaaccctcatttttaggttgattaacttttttagcgtaattatatgcttctttagctgtcttaataccttttttcttccaatttgatgctatttccaaaatatacgctttaggaagtttcatatcttcttttaacatgacaaattgcaacaaaatattaatgacgccaaaagacattttttcacgttcaattaattcttcaaccattgtcttttgcgatatagttggttctgattcagaccaagaagctaacatatcaattggactcgtttgttcaagtaactcaaaccattcatcactttgtggctttggattcacttctgaagatttgcccgccgaagatgatgtagcaggagatttcacctgtaatttaggcatttgattttcgtgttccattaagtaatacgagcgtgcttgtttacgcatttcttcaaaggataactgttgtccacttgtaattgaatttaaaataacatgcttcatgccatctgctgttaaaccatataaagtcgcgagttgtgtaattaaacgctttgcatctttggtaacaatgtcttgactaataaaatgtttacctaacatttgtctcaacatttcaaagtcaaaagattcatttgataaatcgataccttggtacggttcattaatcggaatatcacttgtatcgatatctatttttgtagacggcactttaaaaacatcagtaaattgtcttgttacctgtttaaattcactcaaatcaatttgttgatactcaaagtatttcttcaactcatgaaatcgacgatgctcgacttcactatataaaaagattgacaacattggatcattaaaaaataaatgtgctgaaggcggttgaattaattggtaaacaaattgtgtttcttgttcatcatgtttgacaaacgcctttaacaatccaatcgcttcaagtaagtccatttgttgtctaaactctagtaaattaattttaagttcattcataaaaatataatgagaaagaatcaatgtttcattatgactttctttaacgaattgagtcataaaatgatataaacccactgcttgcgttccaattagcggtgtatacagtcgattcaatacctctaaatgattcgtatttaaatcaaagtgttgcataactttgaattgatcctttggtcttaagccgaattcgaaggcttgtcgtcccatttaagcatcactccgtttgttttcgcttaaaatcccttgcatcgatgctaacaattgatcaacatctttaaattctttatagactgatgcaaatctaacatatgaaacttgatcaacatgcattaacaagttcataacgtgttcacctatatctcgtgaagacacttccgtatgaccttcatctcgtaattgccattcaaccttgttagttatgtcttcaagttgttgatatctaactggtcgtttctcacaagaacgcacaagtccattaagtatcttttctcttgaaaactgctctcttgtgccatcttttttcacaactataagctgactaacttcgatatgttcaaatgtagtgaaacgtgttccacaattttcacattctcttcgtcttcgaatggcatttaattcatcggcatgccttgaatctacaactttagattgtgtagaattacatttcgggcatttcattacatcaccctctttattttgattatgcctaattatactataaatctagagatgaaaaaagaatccctcaatttaattcatttaaccaaataatgaaacaataaaaaacattatatcgttacttattaagtaatttgcatgacaatattattgtattaaaaataaaaaacctaactccgaagtcagagttaggctataaattaattgtattaacttgcacttacagtttcttttgatgtcaaaagtgctccaatttgctcagcaacatctacaactctatttgaataaccccattcattatcataccaagcaataacttttactttattccctgacatgaccattgttgattttgcatcaataatagctgaatttggattagtattaaaatcaacagacactagtggttgatgttcgacttctatgataccttctaaacctgcattttcaaaagcttggtttacttcttctgcagttacttctttttctaaatcaacaactaaatcaacgagcgatacattctttgttggtacacgtaatgccatgccgtgtaatttaccttctaattctggtaatacttcttttaaagctttcgccgcaccagtagaagtaggaataatgctttcattacatgaacgtgcacgtcttaaatctttatgtggattatcaatatttttttggtcatttgtaatagcgtgaacagtagtcattaaaccattaactattccaaactgattatttaaaacttttgcaactggaccaatgcaattagtagtacatgaagcattactaaaaatgtcaaatgcttctatatctaattggttatcatttacgcctttaactaccatttgaacatgtccaccttttgaaggaccagttaacaaaacttttttggcacctgctttaatatgtgcgatggctttatcaccatgattaaatttaccagttgcatctatagcaatatcgatatctaattctttccatggcaagttttcaggattgcgatcagcaaccaatttaattttatgatctccaacttgcaatccattttcaatcggttcaacttttagattatattttccatgtgtcgtatcgtaattgattaaatgtgcaattgtttcgggtggataactagcatttatcgctactacatttaaatttttattttgtaatgcaatacgtaataccattcttccaattctacccataccattaattgcaatattcgttgacattaaaagcaccccttgatctttatgtgttatactttatggaattagtatagcatattatatgaaatttgaaagcgttttccgttgatttatttatcttttttataaaaaatagtcattacttacatacatcaacgcgtacgtaaagtaatgacttatttatagtgtaatattaatcttcttctccgtaattcggcttttcaatataaccttcttcttctaacaatctctcaaggttttgttttaattcaagtttatcccctaaattatcgataacatgatcggccattcggctttttttatcaatagaaatttggctatagacacgtgctttcgcatcttctaatgacaaattattacgttgcattaaacgatccatttgtatactttcagaagtgtatacaacccacacttcgtctactgtattttccaattcattttcaaataataatggaatatccatgattacattatatccttgttttaaatattcttgcttttcttcttccataatatctcgcacgataggatgtatgatagcatttaattctaagcgtttttctggatgattaaacactagatcacccatataacgacgattcatctcaccattttcatcaattgcttcatcaccaaagacttctcgtacttgagctaaacctttactcccctttttaacagcttccctggctgctttatcagcatctactactttaaaaccgaatacggataagagttctgatactgttgattttcctgaggcaattccacctgttagaccaataactttcggcataatttcactctttctttatttttgacatactggacaataatgactatttcttgtcgcgatgatttttgtttcaatttgacttccacacactttgcataccggctgcttatatacattaagatgcaattgcatctcaccagtttttccatcagcatgacgataatctgaaatacttgtaccgccatatttaataccttcttctagtacttctctaacataataaaaaaccatttcttgttgttggtgtgttaagtcttttacttttttatctggtaaaacacctgcacgaaacaacgcttcacatgcgtaaatatttccacaacctgcgattactttatgatccaaaatcacttgtttgattggtttattcttattagactgttgatgaattcgatttaaataatacgtcaatgcttcatttgaaaaaggttcaggcgctatttctaaaaatgaaggataagatgctacagacgcaacatttctaatttctccaaaacgacgtatatctgaataaattaactttttgtcatttgacaactcaaaaataacatgccaatgcttacgataattaggtatcataatatcttcaagttcatctacaatgaaaaaaccgcccgccatacctaaatgactaattaatgtacgttgttctcgtttattatctagctgaaaaacgatatatttacttcttcgttctacatttgtaatggtatagccttccgataaagttttaaaagtatctaattcaattccttttataattgtttccttgccttgagctttaccttcgattactttatccgaaaatataacgtgttcaattttttgatttataacgtagggttcaattcctctttttacatgttctacttctggtaattcgggcataccattaacctcactttattttgcatcataccaggttgcaccataacttgagtctacttttaatggaacatctaattgcaatgcattttccattatctcttctacaaattcactaaatgaatctacttctgacttaggtacttcaaaaattaattcatcgtgtacttgtaataatagtttagcttgatatgttgtctctttcattttttgagcaaatttaaccattgccagtttaatgatatctgcagcactgccctgtattggcgtattcatagcagtacgttcagcaaagccgcgtaaattaaagttacgactcgtaatatcaggaatatagcgtcgacgatgtagcaatgtttccacgtaacctaaagctttggcatcttttacaatatcagacatatattgttttacacctgggaaactagctaaataatcatcaatgaatgcttttgcttttttacgagtaatacctaaactttgacttaaaccataatcacttatcccataaacaattccaaagttaactgcttttgcttgacgacgcattaaactatcgacttgatcagcttctacaccaaatactttcatagcagttgctgtatgaatatcatcgccgttgataaatgcttctttcatactctcatcttgtgtaatgtgtgctaatacacgcaattcaatttgagaataatctgctgataatataacgctatcttttgaagttggtttaaaggcttttcttattttacgcccttcttcaagtctaaccggaatattttgtaaattaggatctacacttgataaacgtccagtttgcgctaaagtttgattaaaacgtgtatggatacgttgatcatcactaattaccttttgcaatccttcaacataagtagactgtaacttagataattgacgatattctaaaatataatcaatgataggatgttcaccttgcaattgctctaagacatctacagcagtagaatatcctgttttcgtctttttaataacaggtaattgtaatgtctcaaacaatacaacacctaattgcttaggagaatttatattaaaatcttcaccagctgcatcatggatatttcgaatcaagacgtctaatttttcttgaatttctttttccatttcttctaaatcatgaacatctgtaaatataccaatttcttccatttcacttaaaatcttagctagcggtagctctaaatcagccaagagttctacctgattgtattcttctaattgtttatccatatttggtttcgcaaagtaaattgcatcagtaatagaagcaacatatggatttaaaacatcatcttcaggtaccttaaatttcttaccttttccatatatactcacatcgtctttcacaaaactttgaccgtacaatgaaacaactgattgaacatcactaatcgtacgagatggatcaattatataactggccaacataatatcgaaagaaatattttgaatatcaatccccaatctatgtgatgctacatatgtttttttagcatcatatacgacttttttcgaattcggattttctaaccatgaaactagttcgacataattatttatgtcatccgcattaattacaatatgtttctcacctgtaaataaagagaattttaaaatattatttcgcaaatagttaccaccgtctaattcgaaatggatggccgcttctttcaatgaagtaaaatcaatattatcaaaagacgtttcaatttcaaatgtcttttctattgcatcttcaacgcttgctgattgatcaatgtcagccaacaattgtttgaattctaacttcttaaacaattcgattttttcttgttgttcatcttgatgagtcattaacgtatcttcaagttttacttcaatcggactatctacattaatcgttgctaattctttactcattaatgcatcttctttgctattttgaagtttttcttttaactttttacctgaaatttcatctaaatgttcatagacaccttctactgtgtcaaattggtttagcaattttattgctgttttctctccaacacctgcaacacctggtatattatcagaagtatctcccattaatcctttcatatcaataatttgattaggtgttaacccgttgtatttttccgcaataaagtcaggtgtataatgatcaacatcagtaacaccttttttagtgtaataaatggttacattatccgttgcaagttgtgttaaatctcggtctcccgtaataataattgtctgaaagcccgctttatctgcttctttacttaaagttccgataatatcatctgcctcatagttatctaattcataacgtttaatatgataagcatctaataattggcgaatataaggaaattgctcacttagttcaggcggcgttttctggcgtccacctttatattcactatatttttcatgtctgaaagtcgttttacctgcatcaaacgctactaaaaaatgatttggcttttcttcttttaaaatcttctctagtaacattgcaaaaccatatactgcattggtatgaatgcctgctttgtttgataacaaaggtaatgcataaaaagctctaaaacttaagctattaccatcgattaatactaatttattcacaattttaacctccagaactaatttatatatattttagcatattcgactgtgatgtcgtaattaaagaaactatctcatagagtatttatacacgacctaatttcaaataaaacaagtgcctatatagacttagctaaaaaataaaaaagacataatcatgattgttcttgatgagcactccataaagtcaggttaaaagtccaacttttgagatgcacattatcatttcatgattatgtctactttttaatatttttatgctgctattttaaatttttataggtaagaataagttatgaatcgtctgaaccaaatggaatatatttaactttggtcattttcggtaattcttcataattattaaaccactcttggtaatttttattgattggtgacggatgatgcatataatgttcaaacggcaatgattccactgtataaacctcttgtcgtggatgatctttaatttgttgttttaataactgaactcttttttcatgttcataatgaacataaataaatgcactaagatatatcacagctaaaactagtgatgcacctttaataaaattaacattgattgacttatatttccgaaattcttttaataaaataattaaaatgattacatgtatcgtataaacaatcaaaaaattacctggttctattggagtaacaatgactagtgtcgacgccgaaacacatattgcaataagtaaggaatataaagtgatttgtgttttacgatcattaatagacaaataaatacctacaaatatcgaaaacgcaaagtaaccacatacaattacgttcacaaaaccaaccaatccaatatctgtatttttatttaataaaaactgattgtaaaatagtaaataataaagcggtaaagtgataaatcctatcataatgatacgacgctttaatattgttaaatgtacataccgatcacttctaagcagtagataaataataagcgctgcaatcatacttaaaattataatctgactgaaaatgacaccatatggaagtgacgttgatatcatttctgcaaattttgaaaagataccttgattatttgaaacttgttgatattctgatccttcaaataaaattttgcgataatttggattggaaaacataatgattgtacctatagtagcaatcataaatgaaaacaataatttataattaagtgttcgatttgcagtaaattcatacagaaaagctaaaattaaaatgatacagtggaataatgtcacattctccataaataattgaccgaagaagcataaaacatagaatagtacagtaacacttaccggctgcttttctttatatataattgcattaatacaataataaataataaagagtgaaattagtgttgatgtcgcataattataaaatcctgcaaaccagccatatgtatctgcataaatagcacttggtaaaattaacattaaagaaaatgctaacaaataatagcttgtccacgctttacaacgtgtaatgtgcataatcatccaaatgatgcccatactaatgaggccatatgaaagccaacgtaaccagcttacatgtacagctataatttcaaagatatttccgatatagcgaccattaagtgatgcaaatcctacttttaaaatatcagtattataattgctaaaccattgtaaatcatcgtgcatgagtggtagtaagatacccataaaagtataaaacaataatatcgcaattaatatcaaagttgtcttgtgtaattgaattgttttcactttgctaatcctcaaatctagttaaattttcctcaacttgtaggtcgaaaaattaattcaatatttttaatgtatttctaattttcacctatgcatgtttcctcaatcaaattagataaacaaggtatttaatattactttcaacaatttatctaaatcgcccctcgtctttttctatgacgaatgattacacttgtctattcaagtgtttaaattaagatttatttccgttcaaataaaacttattactttttaattaagcatctatttcaagcgcgttactaaaatttctttattataataaatatattataaaattgcttgattcacaacaatctattacttataacttacaaatcgacatatacaaatgacaaaattgacaaccgaatttattccacttcattaactctaatttaataccaatagagatttgaacgaaataaaaaagcagcaacaacttcgtgaaaaatacacgcgctgttaccactttaatttttattctttataatcttttagaataactttgaacgttgagcctttgccaacttgactattcacttcaatattgccttggtgggcctctactatatgctttgtaattgataatccaagacctgtcccaccagaatctctacttcgtgctttatctactctataaaatctttcaaaaatacgttgttggtcttctaatttaatacctataccaaaatcttgtacttcgaaaatgacacgaaagtcatctcgatacacacgaacgttaatatctccatcttcataagaatagttaattgcattcgttaacaaattcgtgataacttgagcaattttactttcttgtgctttaacaatgacatctttttcaatatcagtatgaatggaaatatttttttgattggcttgagtcatcatattatcaataatacgccgcgttaaatctgataaattcatatagtctgtatctaactctgtatgttgctcaatatgcgataaatctaacagatctgttactaaagattctattcgatttgattcttttaaaattatgtttaaaaacatgtctaatgattccgcatcattttttgcaccatcaataagcgtttcagcaaaccccttaattgaagtaataggtgtttttaattcatgtgaaacatttgctacaaattcacgtcttagattttcaagttgtttcagatttgttatatcatgcatcacaactaaaatcccttgcaaacttttttgagacctagttaaaatcggaacgcatgaaatatcaaagtacttggcatggacttggtttattgcaacttccaattgttcataaataggtttttcaactttaaaactttctaaaattaattgctcaatttcagtattaacatagccgtgatagcctacttgttcaatattatgcgagatgttgaactgttcataatacgctttatttgcaacaacgatttttccatttcgatctatcattaaaatagcacttggaatattttcaatcgttgtttttaaacggttggattgaattttttgctcattattaagcttttgaaggcgtcgtgctaaatcattggtagacacaaaaagcgctttagtttctacaacattactttcaggtacacgtatgtgataataaccatttgccaacaattgtgttgcataagtaacttcttgaatgggacggattaatgtacgcttaaaactacggcttgcaaaatacagacaaatgagtacaactaaacatgtcaaaataagatatttccacaacgtccaatgcatttctgtaatatcgttattgtaacctttaatccatacatgataaccgttaaccttcttattaaaaataaaaacgtcccttttttgaatatagctatcactatttgggatagctttcagtttgccactactaaacacctttttatcatgcttagttatcaataaatctatattttgctgttttacaatttttttaactttatcaatctcattatcttggactaaataaatatatgatcttgcatctgttgctagagcttgttcgtgtttttctgataaaacatatgtgatggaagcgtgaataataatgcctaatgtaacaaaactgataattaatatactgcttatcaataacattaagcggtggtgaaacttcatcattgttctttaggtctttccaatttatagcctaagccacgcacagttttaataagttgtggcttcttaggattatcttctaatttatctcttaaatgactgatatgtacatcaacaattcttgagtctcctgcaaattcataattccataccgtatttaacatatgctctctcgtaatgactctgccttgtctttctatcaaataaagcaagagttcaaattctttcggtgttagctccaataactcattatgcttatatacttcaaaataatcgggtctaatacgtatcgatccgatggtaatatcatcgtcaatctcttctacttcttttacaaattgagaacgtcttaaaatggctttcacacgggcaacaacttctctaggtgaaaaaggcttagtcatatagtcatcggcacctaattctaaacctaatacccgatcaaattcatcatttttcgccgttaacattaatatagggactaaatttttatttgttcttacagtcttacatacgtcaatgccatcttttttaggtagcataacatctaaaataattaaatctggctgttcactttctaccttttctaaagcctcatcaccatcaaatgcgacaacaacttcataaccagctgtttctaagttatatttaagtaatgttacgattgaatgttcgtcatctactaccaacactttttgcgacatggtatgcctccctaacttataattatatttacattataaccgaactatttataaaaataacatcctacacattatctttacacattttttacattactttacatataaataaaatacttcttatatttccttctatcatttgcatgacttactctgggacaacgaaataaattttgtaaaaatagcatttctatcccactacctatgcatgagttttactcatttattcctaagcttatgtacatattcgctttgtctaatgtgtaagaaacactacataatcaatcattggtgactctttattatttctatcctgttgccaacttcaattcatttaaaaaggcgaacctagcaattaaagttgctagactcacctaattttattttgcttattttaaatttttaatcaattcatctgcaaatgctgatgtagaaacttcttcagcaccatccattaaacgggcaaagtcataagtaacaacttttgaagcaattgtatcttcaattgaatctgtaatcttatctgccgcttcttgccatcctaaatgttctaacattaatacagaacttaaaattactgaagatggattcactttatttaaacctgcatattttggagctgtaccatgtgttgcttcaaaaatagcatgacctgtttcataattaatgtttgcacctggcgcaataccaataccaccaacttgtgcagctaaagcatctgaaatatagtcaccattcaagttcatagttgctacaacatcatgctcagctggacgagttaaaatttgttgtaagaaaatgtcagcaatagaatctttaatgataatcttgccttctttttcagctttttcttgagcagcattagcagcatctctgccttcattttcaacaatttcgtcatattgttgccaagtgaatacttgatcaccaaattcagataatgctaagtcgtaaccccactgcttaaatgagccttctgtaaatttcataatattacctttatgaactaaagtaactgatttacggttattatcgatagcatattgtatagctgctctaactaatcgctcagttccttctttagaaactggtttaataccaatacctgaagtttctgggaatcgaatgtttgtcgcacccatttcgttttgtaagaagtcaattacctttttaacttctgttgtaccttctttaaattcaataccagcataaatgtcttcagtattttcacggaaaataaccatatcaacatcttgtggacgtttaacaggtgatggtactcctttaaaccaacgtaccggtcttaagcaagtaaataaatctaattcttggcgtaaagccacatttaatgatctaataccaccaccaattggtgttgttaaaggtcctttaacagcaattaaatattctttaattgtatcaagtgtttcttgaggtaaccattcaccagttgtatcaaatgctttttggccagctagcacttctttccattcaatgcgtttttcgccattataggctttctcaacagcagcatctataactcggcttgctgccttccaaatatccggtccaattccatcaccgataataaatgggataattggttcattaggtacgtttaatccttcagttccttgagtaattttttctgcagtcatagttattttacctccaaattttacatcttcatttttaatttgtattgattattttctttcttcaagcgggatatacttacgattcgtttcgccaatatatttcgctctaggacgcataattctattatctttatattgttctaaaatatgagcaatccatcctgcagaacgacttacagcaaagattggcgtgaataagtcatgaggtatttccatacagtgataaacactcgcactataaaaatcaacattaggaattaatcctttttcttctgccatacgtttttccattttcactgacatttcaaataattcttcacgaccagcgtctttcgtaatttgacggctcatttctcttaaatatttcgctctaggatcaccatctttatatacacgatgaccgaagcccattactttatctttattagcaaatttttcatctaagtaagcatcaacattttcaattgacccaatctcagataacatcgtcataacttgttcgtttgcaccaccatgtaatggccctttcagagaacctacggctgctacaatacctgagtacatatctgacaatgatgataccgcacaacgtgccgtaaatgcagatgcgttcaactcatgatcagcgtgtaaaataagtgctttattgaaggcttctacttctatatctgttggtaattccccacgtaacatatataggaagtttgccgcataacttaagtcaggattaggcttaagtggttctttatcttgtcttactcgagcaaacgctgtaactaatgatgctactttagcctgtatacgcattgctctttcataacgattttcatctgattcattttcagcatcaggatcgaaatgtgcaatatatgataatgacgtacgtaatgctgtcattggatgcacgtgatctgtaacatactcctcaaaatgtgtatacacacgaggatttaatgtcatgtattgatttaatttcccttttagatgagcaagctcttcttcgtttggcaatctatagttccataataggaaaataacttcttcaaattgcgcattttcagctagatcatcaatatcatagccggcataagtcaattgactttcaataattgaacttattttagtctccgctgcgataaccccttctaaacctctttgtaattctgccatgataaatttcccctttactgtttctttatgaaatggctttcaactaatattatagctaaacgcatttcgtttgtgaaatataaaaactggcattatatgtgcaacaatttttttgtaaatctatgtaaatgtcacagaatagccacaaatagcaccattaaagctttttcaagatgtgaataatccatgaattttacaatagaattaaattttcaattggttattatatatgattataaaaaccaaagtatattaacatggaattttacacatttttaccgaaaataattgtatatatctcaatataagtgcataataaacatatctatatttaagggagatgtattatggctgaaaaattacaaagggaactgagcaatcgccacatacaattaattgcaattggcggtgcaattggtacaggcttattcttaggtgctggtcaaacgattgcattaaccggcccttcaattctattaacatacatcattataggatttatgttatttatgtttatgcgaggtttaggagaaatcattatacagaatactgaatttaaatctttcgcagatgtaaccaatacatatattgggccttttgcaggatttgttaccggatggacatactggttctgttggattattacaggtatggctgaagtaacggctgtggcaaaatatgttagcttttggttcccagaaattccaaactggataagtgcactattttgtgtactgttattaatgtcattcaacctacttagcgcaagacttttcggagaattagaattttggttctctatcattaaaatagcgacaattattggtttaatagtagttggtttcgtcatgattctatttgcatttaaaactcaattcgggcatgccagtttcacaaatctatatgaacacggcatattcgctaaaggtgcttctggattctttatgtctttccaaatggcactattctcatttgtaggaattgaaatgattggtgttacagctggggaaacaaaagatccagttaaaacaattccaaaagcaattaacagtgtacccattagaattttaatattttacgttggggcgttagcggttatcatgtctattatcccttggcagcaagttgatcctgataacagtccattcgtaaaattattcgcattgatcggaattccgtttgctgcgggcttgattaattttgtagtattaaccgctgctgcttcatcatgtaacagtggtatattctcaaatagccgtatgcttttcggtttatcaagtcaacaacaagcacctccgaacttttctaagacgaataaatatggcgttccacatgttgcaatctttgcttcatcagcattattacttgtggcagcattactaaactatattttcccagatgcgacaaaagtatttacgtatgtgactaccatctctacagtgttatttttagttgtatggggtctgattatcattgcatatatcaattatagtcgtaaaaacccagatctacataaaaatgctacgtacaaactattaggtggcaaatatatgggctacttaatatttgtattcttcatttttgtgttcgggttattatttattaatgttgatacaagacgtgcaatttattttattccgatttggtttatacttttagcatttatgtacttaagatataaacgtatcgctgctaaatcaaataaataacaacaagttttagggcttgggacattaagttcttaggcaatgtaaaaaagctgatttctattagattatttgatagaaatcatgcttttttgatatgtattttataatgtacagctcgttgagctgctattttccttatattaaatgccatcaatacaaaacctagctctcgtttaactttatttattcctcgaactgacattcragtgaaacccaaaatagccttcataaatccaaaarcrrgctctacatcaatttttctttgactatagatgtttttcgtttctggttcagaaagcttttgattaatttggactttaaagtattcccaattataattcwtcatgattttcttattggatttcgaatttggtttcatgcattgatgtctcaaagaacatgatgaacatycatcacattcttatcctttgaagtctcgtttaaaaccatatctatcattacggtatgcatatcttttaaaacctattcttttgttattaggacatataaattcattattaagttcgtcatatttccaatttttgagtgttgaaaatgccacttttaaactttctagttttatcttyaataaacatgccatacgtaataagtggcgttttattaagatcatctataatagccatatagttctgctcactaccataacctgcatcagctacaatatactctggtaaataaccgaaggtattttgaatcattgttaaaaatgggattaatgttctagtatctgktgggttttgaaataggtcataggataaaacaaattgagaatttgtcgctatttgtaaattgtatcctggcttaagttggccatttttcatatggtcttccttcattctcataaaagttgcatcatgatcagatcagttttagaaaaactatttctatctttaagaatcgatttttgttcttcatatttattttttctttcggaataatcatcaaatttctttttgaacttcttaatstcagttatttttttacgggtctgttttctaatttgagcacaatcttcgttctcaatagaatgatttaaatcttcgatttctttatctaaatgactaccaattaaatctatttcttctattgttaaatcgctatctccatcttcttttatctctggtattattttttcttcaactaagtcacgatataatgtttttgaattttcgttcaatttcgattcgtgattttgaatacttttcttccacacaaatgtatatctattggcattagcttctacttttgtaccatcaataaaaattgaattattatcaataagattttgctttaaacattgactatggaactgaataaataaagattcaattaacgcatcagtattaggattcactctaaaacgattaatagttttataagaaggtgtttgatcttgagctaaccacatcattcgaatactgtcatgaagtaatttttctattctacgaccagaaaatacagattgagtatatgcatataagatgatttttaacatcatttttggatgataggatgttgcgccacgatgatgtctgaattcatcgaattcgctatcaggtatcgtttcaacaatttcattaacatatcgcgaaatatcattttgaggaattctaacagaggtttctattggtagtgtaagttgggtcatgttataaattttatacataaggcacctcgttaatttagtttagtggtatttattaaattatacgaagggacccaacacagaaaattcattttattgaattttacatttatgtgcaagttgggcaaagtgttttatttttttaaagtatgtaaaagtaaaattacatgttaatacgtagtattaatggcgagactcctgagggagcagtgccagtcgaagaccgaggctgagacggcaccctaggaaagcgaagccattcaatacgaagtattgtataaatagagaacagcagtaagatattttctaattgaaaattatcttactgctgtttttttagggatttatgtcccatcctgttttatatgcaacttataatattaaattgcgtacttggctcaaaacttttactttctcatctatttaataatgtatcatttcagaaatacatccatacttctattttataataaatttccaaagtaatatgagtgaaagtttgaaggtgataatgtacatgtataaaagatataaacatttatatagattgccattcatacactatcattatcaaataacctattaattacgtcataaaataccagatgaaccaaaaaacgcctttccattgttgataaatggaaagacgtttttttataaattatagtacgtttgcatatccttcaaagattttaccttgagcagcatcaatcgtaactaacatgttattgcttatgtttttaacagctttttctacacctacaactgttggaatacctttttctaaaccaacaattgcacttggtgatgtaataccattttcttctgtaattaagcctaaagctttttctacataaggtacaaacgtttcatcgattgagttagtaacgataactttgtcagataaatctttaccttctaaatctttaacagtttcagcaactaacgtagtaccaacaactgatccacgtccaataccttgaccattagcaatttcgtcaccaactaggtggattttcatcatattagtagttccagtttcaccagttggtacaccagcagtaataatgattaaatcaccattagatactctaccagtttcaacagctgttgcaactgcattgtttaacaatgcatctgtactcttacgtccttttttaactacaggttgaactccccaaacaattgaacattgacgtgcagtttcttcacttggagtcaccgcaataatgtctgaatgtggacgatatttggagatagtacgtgccgttgaaccactttcagtagcagctacaattgctttaacatttaagtttaaagctgtatgtgcaaccgaaataccgatagcattcactaatgaagtttcaactaatttagtacgatctgacaataactttttgtaatcttgggctgcttcagctgatacagcaatatttctcattgttttaacagcttcttcaggatataaaccagcagcagtttcaccagataacattactgcatctgtaccatcatagattgcgttggcaacgtcactagcttctgcacgtgtagcacgtgggttacgttgcatagaatctaacatttgtgtagctgtaataactggtttacctaatttgttacattgtctgattaaatctttttgaaccattggtactttttcaggtggaatttcaacacccatgtcaccacgtgcaaccattaaaccatcagacacttcaagaatttccgcaatattatcaataccttcttggttttcaattttagggaatactgaaatgttagctttttgttcttctaaaatttcacgaatttctaaaacatcactaggacgacgtacgaaacttgctgcaatgaagtcaacattttctttaataccgaaacggatatcttcagcatctttttctgtaataccaggtaaacttactcttacgccaggtaagttaacaccttttttgtttttaagctcaccagagtttaaaatatcacatttaacttcttttttagcatggtcaatatctttaacttgtaattcaattaagccatcatcaagtaaaatgtatgaacctacttgaacatcgttaattaagttttcatatgttactgagaacttttcaggtgttccttcaacttcattcatgctaacaataacttcgttgccacgttcaagttcaatgataccgtctttcatattatgcgtacgaatttctggaccttttgtatctaataaaattgctacaattttgtctaatcttttagctactttacgaattgtatcaattctacctttatgctcttcatgactaccatgtgaaaagtttaatcgtgcaacgttcataccagcattgattaatttctcaatcatttcttctgattctgaagctggtccaattgtacatacaattttagtttttctcattttataattcctcctgaaatcttatatagataacttgttagcaagttcatatagactataatcaaatttatgatctttaccatcaaaaatttcatcaaaagatgttgctacaattttattgttcttaattccaacacccttagctgtttcaccttgcattaataagtctaccgcatatccacctaaacgtgatgctaaaactctatccgcacctgttgggctaccaccacgttgaacgtgacctaacacagacactctattatcaacattgatgtattgtgataattctttttgacaatcttgcgcagtcatacaaccttctgctacaagaacgattgagtgtttcttaccacgtttaataccttgttcaattttatcagctatttctttaatatctgttttcacttctggaactacaattgtctcagcaccaactgataatccagcccataatgctagatctccacaatcacggcccattgcttcaatgataaatgttcgtgcgtgacttgacgcagtatctctaattttgtcgactaagccaataatcgtatttaatgctgtgtcaaatccaattgtaaaatcagtaccattgatatcattgtcaatcgtaccaggaataccgatagtttgaatttctttacattcctcactgatgcgttgtgcaccgcgataactaccgtcaccaccaataactacaaggccctcaatccctcttttacgtaagttttcgattgcaactttacgtacttcttgctccttaaactctggacatcttgctgaatacaagaatgtacctccacgctgaatcgtatccccaactgatcctaattcaagtttatgaatatcatcatttaacaatccttggtaaccatgatacacaccataaacttcaatttcattgtaaattgctgtacgaacaactgctcttacggcagcattcattccaggtgaatctccaccactagttaaaactgcaattttcttcatgacgacatacctttctataactgatttatctttaactctaaattaccacaaattgatatgtcattccatcaaaactaatgtattgaattgatgtaaacgttttaaatattgaattttattttaacttaattaaaaaaagattagtagccacaattttgactactaatcttagttaaaattcagtatctaaatattaaattattgttttaatgtacttcaatttatggtaaaacccagtatcgatttaacataaaaatgctcaagttgattattctatataagaaccgatatttctgaatttttcaaagcgatcattagcaatttcatcacgtgataatgactcaagtgaatctaactgtgcaacaaacgctgatttaatagctaaagcttgctgttcaatatctttatgtgcaccgccaagtggttcagaaatgacatcatctataatacctaattgcttaatatcatgggcagtaattttcattgtttcagctgcaattttagccaaattactgtctttccataataatgccgctgcaccttcaggagatataacagagtaagtactattctctaacatcaatactttattggcaataccaatacctagagcacctccactgccaccttcaccaatgacaatcgcaataactggtacttttaatgaagccatctcaatcaaatttgttgcgatagattcactttgtccacgttcttcagcagctttaccaggatatgcaccttttgtatctataaatgtaaagataggacgattgaatttttcagcttgtttcattaaacgtaatgcttttcgataaccttctggatgcgccataccaaaatttcgataaatattatcttttgtatcttttccacgttgttgtccaataactgtaacagcacgaccatttaaaaagccaataccaccaatcattgctggatcatctctaaaattacgatcaccatgtagttccataaacgaatcaaagatatatggaatataatctagggtcgtaggtctttcttgcaaacgcgcaatttgcacacgatcccatggttttagatttgtatatatttttttagtttctcgttccaatgacgcttcaagcatgtcaatttcttcttgtaaatccacatcatttttatcttgagattcttttaaagattcaattttatttcgaatttcaaaaagtggtttttcaaaatctaacattatttagtcacctcttgatggatttttagaatttcagacaatgtttgacgcatatcattacgatgtacaactttatccaattgtccatgctctaataaaaattctgcagtttggaaatcatctggcaatttttcgtttattgtctgttcaataactcgacgacctgcaaaacctatcaacgcttttggctcacttaaatttatatcaccaactgatgcaaaacttgcagatacaccaccagtagttggatgtgttaaatatgatatatataatagtccagcgtcagaatgacgttttaaagatacactggttttacccatttgcatcaaggaaataataccttcttgcatacgtgcaccaccacttgcagagaaaagaataaatggtaaacggttctcagtgcagtaatcaatgatgcgacatatcttttcaccgataaccgatcccatacttcccattctaaaacgtgaatccatgacagcaacgccaaatttcataccatctagttgtgctgtaccagtcacaactgcttctttaagacctgtcttttgttggtccttttcaattttttctaaataacttggaaaatctaatggattcgcagaggtcattcccttatcgaattctgtaaatgatccttcatcagaaattgcttctatacgtttatacgcagttaaagcaatatgatgatcacaattaaagcacacatttaaattttcagctaattcttttgtgtacataattttcttacactttggacacttagtcataatacctgcaggcacatcattatttttagagtcttgtactgtaagatatttctttttctttgttcgattaaaaaaatctttaaacataggaaaacctccaaataacctctgttctaaccatttagagccttaaactgaacttgaccagttaaaaacgggtttaaatttatttgatttatattcgtttgactgttgaatgtttatcataaactttcattttcatcattttaatgactctttattgctaacttttaagcaatttaattaaacgttaattatttttattgtaaatctgtaagtttcattgttttatcatacacatcttgcggatcaacttcaatcctagctactccagattccattgccgctttagcaacattacgagcaactgatggcgctacacgtttatcaaacggtcctgggatacagtagtcttcatttaattcagaactatcgattaaatcagcaatcgcttctacagctgcctttttcatttcttcatttatatgtgtagcttcaacctctaatgcacctctaaaaataccagggaaagctaatacattattaatttggttaggatagtctgaacgtcctgtaccaacaactcgtgcacctgccgctttggcatcatcaggtattatttcaggatttggattagccattgcaaatataattggattatctgccatactcttaaccatatcttgtgacagcgcattagctacagaaaccccgataaatacatctgcatcttttacgacttcttctaaagacccttcaatcttatctttatttgtccattttgctacaacatctttcgtaggattcataccatatgaacgtccttcaaaaattgcgcctcttgagtcacacataaccatatttcttacaccatacgcgtatagtaatttaacaatggctattcctgctgcaccagcaccatttagtacaacttttattttagcaatatctttgttaacaactctcaatgcatttaccaaacctgccaatgttacaattgctgtaccatgttgatcgtcatggaataccggaatattagtttcttttttcaatcgttcttcaatttcaaaacaacgtggtgccgaaatatcctctaaattaataccaccataattaggttctaacaacttaactgttttaatgatttcttcggtatcagttgtatttaacgcaataggcaccccattgataccagcgaagcttttgaataatactgctttaccttccattacaggaatacttgcttcaggtccaatgttacctaaacctaataccgctgttccatcagtaataactgcaactgtatttcctttaattgtgtaatcatatacttttcttttatcttcataaatatctttacacggttcagcaacgccaggtgagtatgctaaacttaattcctctttattagtaacttttacatttggtttaacttctaatttaccttgattacgtttgtgcatttccaatgcttcatctcttaatgacatgaaatcagcccctaattcaatatttatttttaaaaaataacttggataaaacgcattacattataaaagtaaaaatattgggtaaatctgaatgagtaagaatttatggttttgattatgtaacacaaatagcgataaacgataataaaataatatttataaagatacattaaaccatactatctaaagatatacctttaattattataatggatagcaaaaaccaatatatcaaaaagttattatttttccgcacgatatatcgacaaaattctttactcaatttatgtatactgctttttgtgctaattattcttatggattaatcaataatgtaaagtgaaactcataaaaataataagcataaaaaactaatataaacgcaaactgatggttaaaaaatatctaaccatcagtttactatatcataatttattagttgataaaagttatataagcctaatatcactagggttaaaggattgtataaaattattaaacatactatctttttgattaatatagcctaaagtagtcatttgtttaatcgtttcatcataaaaggataacacaacatcattagcattctctttcgtagctttaatcatctcttcaaacatatctatttgtgatttatttctaattataatttgtttggcaaatgctaatttttgttcttcaaaagtggctaatgtctgaatctcatttataattagttgacgttgttgctttctatggtcaaatttcccgctaactataaacaagtcattatgtgataacaactcttcgtactttttaaactgattagggaaaatcacaccatctaaagtttcaatgccatcatttaatgtgacgaatgccatattttgaccatttttagttcgaatttgtttaactttatcaaactgtactaatataggtttataattctgcgcgttactcaatttaaatatcgttaaatattgtttggcaacaaactttttatctactgggtgttgcgaaacataaaatcctaaatattctttttcgtactgactaataagtgcatcaggcaattcttctttatcttcatacatctgttttggcgttaaaatatcaaataaaaaaccatcttgttcaatgtttaaatcgccatccaacacttgatcaatagcttgcaacaacgttgaacgtgttttaccaaaagcatcaaacgctcccactaaaatcagtgcttcaagtaactttctcgttttgactctcttcggtatacgtctagcaaaatcaaagaaatctttaaatttgccgttctgataacgttcatcaacaatcactttcacactttgataaccaacacctttaattgtaccaattgataaataaatgccttcttgggaaggtttataaaaccaatgactttcgttaatgttcggtggcaatatagtgataccttgtttttttgcttcttctatcatttgagcagttttcttctcacttccaataacattacttaaaatatttgcgtaaaaataatttggataatggacttttaaaaagctcataatgtatgcaattttagaatagctgacagcatgtgctctaggaaaaccataatcagcaaatttcagaatcaaatcaaatatttgcttactaatgtcttcgtgataaccattttgctttgcaccttctataaaatgttgacgctcactttcaagaacagctctattttttttactcattgctcttcttaaaatatccgcttcaccataactgaagtttgcaaatgtgctcgctatttgcataatttgctcttgataaataataacaccgtaagtattttttaatataggttctaaatgcggatgtaaatattgaactttgcttggatcatgtcttcttgtaatgtaagttggaatttcttccattggacctggtctatacaaagaagttacagcaacaatatcttcaaagtgttccggctttaatttttttaatacacttcttacaccgtcagactctaattggaatatgccagtcgtatctccttgcgacaacaattcaaacactttttgatcatcaaacggaatcttttcgatatcaatattaatacctaaatcttttttgacttgtgttaagatttgatgaataatcgataagtttctcaaccctagaaaatctatttttaataacccaatacgttcggcttcagtcattgtccattgcgttaataatcctgtatcccctttcgttaaaggggcatattcatataatggatggtcattaataataattcctgccgcatgtgtagatgtatgtcttggtaaaccttctaactttttacaaatactgaaccagcgttcatgtcgatggtttcgatgtacaaactttttaaaatcgtcaatttgatatgcttcatcaagtgtaattcctaatttatgtgggattaaacttgaaatttcatttaatgtaacttcatcaaaccccataattcttccaacatctctagcaactgctcttgcaagcagatgaccgaaagtcacaattccagatacatgtagctcgccatatttttcttggacgtactgaatgaccctttctcggcgtgtatcttcaaagtcaatatcaatatcaggcattgttacacgttctgggtttaaaaaacgttcaaataatagattgaatttaataggatcaatcgttgtaattcccaataaataactgaccagtgagccagctgaagaaccacgaccaggacctaccatcacatcattcgttttcgcataatggattaaatcacttactattaagaaataatcttcaaaacccatattagtaataactttatactcatatttcaatcgctctaaatagacgtcataattaagttctaattttttcaattgtgtaactaagacacgccacaaatattttttagctgattcatcattaggtgtctcatattgaggaagtagagattgatgatattttaattctgcatcacacttttgagctataacatcaacctgcgttaaatattcttggttaatatctaattgattaatttccttttcagttaaaaaatgtgcaccaaaatcttcttgatcatgaattaagtctaattttgtattgtctctaatagctgctaatgcagaaatcgtatcggcatcttgacgtgtttggtaacaaacattttgaatccaaacatgttttctaccttgaatcgaaatactaaggtggtccatatatgtgtcattatgggtttcaaacacttgtacaatatcacgatgttgatcaccgacttttttaaaaatgataatcatattgttagaaaatcgttttaataattcaaacgacacatgttctaatgcattcatttttatttccgatgatagttgatacaaatcttttaatccatcattatttttagctagaacaactgtttcgactgtatttaatccatttgtcacatatattgtcataccaaaaatcggtttaatgttatttgctatacatgcatcataaaatttaggaaaaccatacaatacattggtgtcagttatggcaagtgcatcaacattttcagacacagcaagtcttacggcatcttctatttttaagcttgaatttaacaaatcataagccgtatgaatatttaaatatgccaccatgattgaatggcccctttctattagttaagttttgtgcgtaaagctgtagcaagttgctcaaattcatcccagctgtccactgaaactcctgacgcattcggatgaccaccgccaccaaaatcttgcgcaatatcattaataatcaattgccctttagaacgtaatcgacatctgatttcattaccttcatcgactgcaaatacccatattttcaagcctttgatgtcagcaattgtattaacaaactgagatgcttcatttggctgaataccgaattgctccaatacatcttcagttattttaacttggcagaatccatcatccataagttcgaaatgttgtaaaacataaccttgaaacggcaacatttttgggtccttctccatcattttatttaaaagcgcattatgatcaatatcatgcccaattaactttccagcaatttccatagtatgttctgaggtattgttaaaaaggaatcgcccagtatcaccgacgataccaagatataaaacgctcgcgatatctttattaacaattgcttcatcattaaaatgtgagattaaatcgtaaatgatttcacttgtagatgacgcgttcgtattaactaaattaatatcaccatactgatcaactgcaggatgatgatctattttaataagtttacgacctgtactataacgttcatcgtcaattcgtggagcattggcagtatcacatacaattacaagcgcatcttgatatgttttatcatcaatgttatctaactctccaataaaacttaatgatgattccgcttcacccactgcaaatacttgcttttgcggaaatttctgctgaatatagtattttaaaccaagttgtgaaccatatgcatcaggatctggtctaacatgtctgtgtataataattgtatcgttgtcttcgatacatttcataatttcattcaaagtactaatcattttcatactcccttttttagaaaagttgcttaatttaagcattagtctatatcaaaatatctaaattataaaaattgttactaccatattaaactatttgcccgttttaattatttagatatatatattttcatactatttagttcaggggccccaacacagagaaattggacccctaatttctacaaacaatgcaagttggggtggggccccaacgtttgtgcgaaatctatcttatgcctattttctctgctaagttcctatacttcgtcaaacatttggcatatcacgagagcgctcgctactttgtcgttttgactatgcatgttcacttctattttggcgaagtttcttccgacgtctagtatgccaaagcgcactgttatatgtgattcaataggtactgttttaatatacacgatatttaagttctctatcatgacattaccttttttaaatttacgcatttcatattgtattgtttcttctataatacttacaaatgccgctttacttactgttccgtaatgattgattaaaagtggtgaaacttctactgtaattccatcttgattcattgttatatatttggcgatttgatcgttaattgtttcacccatctgaggctgtcttcctaaaagttgcatagactttaaaacatcttgtctattaatcacacccactgtctttttattactcgaaacgacaggaatcaattcaataccttcccaaatcatcatatgcgcacaacttgctactgtactcatagcatttacataaataggatttcgcgtcatcactttatctatttcgtcgtcgtcctttgtattaatcatctctcgacttgttacaatacctactaatttatacgactcattgactaccggaaatcttgtatggccagttcgattcgccatacgcttataatctgctattttcatcgtatcaaacagcacagataaatcatctaatggcgtcattatatcttgaactattaagatatcttttcgtattttctgattaaaaagtgctttgttgataatatttgcaactaggaatgtatcataacttgatgatagaacaggtaaatcatgttcattcgcaaaattaataactttattagatggcttaaatccaccagtaattaatatagccgtacctctttttaaagcttcaatctgcacatcttcacgatttccgacaatcaataatgtctttggaccaatatactttaaaatatctttgagttccattgctccaattgcaaatttagataccatcttagtgatacctttgttgccacctaacacttggccatcaataatattgacaatttcattaaaagttaaatgttcaatttcattacgattacgtttttcgattcgaaccgtaccaacacgatctatcgttgcgaccatgcccattttatcagcatctttaattgcacgatatgctgtcccttcagatacgtttaaaaatttagcgattttacgcaccgaaattttagagcctatagataacgattcaatataatctaaaatttgttcatgttttgtcattctttacctcttcttttcgaacagtattaactacattataactttattttggataaaaagcattgaagtgaaatgaaataatgatcgtttcacctattttattttttgaaaatatacaacaaacacaaagatcacaaaatctttaattttaaatggaaaaatccattattatttattagaatgtaagtgaggagggatgtactaatgtataaaaatatattacttggtgtagacactcagttaaaaaatgaaaaagcactaaaagaagtgtctaaattagctggcgaaggtacagtcgtaacagttttaaacgcaatcagcgaacaagatgctcaagcatcaattaaagcaggtgttcatttaaacaaacttactgaagaacgaagcaagcgattggaaaaaacacgcaaagctttagaagattatggtattgattatgaccaaataattgttcgtggtaatgcaaaagaagaactattaaaacatgctaatagcggtaaatacgaaattgttgttttaagtaaccgtaaagcagaagacaaaaagaaatttgtacttggaagtgtcagccacaaagtagcaaaacgtgcgactatccctgtattaatcgttaaataaaatttttatccagaatcacaaataatctttcaatcatgatgcagtctcaaacgactgagtaaatacaagaaacgattatgactgtggttctggattttttatatcgtagtaaatttataatcaatgtctaattgtataaaactaaaattacgagagtaggtcagaaatgataaagaaccactgatgtcccccgtccacgtcgtaactgaatcagtagaatataaaaacacccactaaaaatatgcagacgataacttccacatagattagcgaggtgttttttagtgtaaaatctatattctatttaaaactgaacagattcacctggttttaaaatttgcacgtcccctacattaacagcatctttaaattgttgtggatcttgttcgattaatgggaatgtatcataatgaatcggtacagaaatttttggtttaataaattcattaatagcataacttgcatcatcaatacccatcgtaaaattatctccaattggtacaaaacatacatcaactggatgacgtttcgcaataagtgacatgtcactaaacagacctgtatcaccagtatgataaattgtttttccttcaacttcaaacacgatacccattggcatacctaaataaactggaataccattttcatgtgtaaaacttgaactatgaaatgcttgaacaaatttaacgcttccgaaatcaaagtttgctttaccaccaatattcataccatgaacattttcaacaccgtgatatgaagaaagatagtcagccatttctgcacttccaattactgttgctcctgttttctttgctagttccacaacatcaccaaaatgatcaaaatgaccgtgcgttaaaacgatatagtctacctgcactgtttcaatattcaaatcacacttagggttatttgaaataaacggatctacgataacctttttgttgttcccttctaaataaatcgttgattgaccatgaaatgataacttcatttgagcatcctcctatcaattactatataaatttagtacccttttgccacttaattataacaaattctcaaattttaaaaattgaaaatctagttaatgtattagctcgattttgaaatctaataataattggcataaaatggaagtaatattatgttgaggagtgtttataaaatgacaaaaatatcaaaaataatagacgaattgaacaatcaacaagctgatgcagcatggattacaacaccgttgaatgtatattattttactggataccgtagcgaaccccatgaaagattatttgcattattgattaagaaagatggtaaacaagtactattttgtccaaaaatggaagtcgaagaagtcaaagcatcacctttcacaggtgaaatcgttggatatttagacactgaaaaccctttttcactttatcctcaaacaatcaataaattactaattgaaagcgagcacttaacagtagcacgccaaaaacaattaatctctggtttcaatgtcaattcattcggagatgttgatttaacaatcaaacaattgagaaatattaaatccgaagatgaaattagcaaaatacgtaaagctgctgagttagcagataagtgtatcgaaataggtgtttcttatttaaaagaaggtgtgactgaatgtgaagtagtcaaccatattgagcaaactatcaaacaatatggcgtcaatgaaatgagttttgatacgatggttttatttggagatcatgccgcatcacctcatggcacaccaggagatcgcagattaaaaagcaatgaatatgtactatttgatttaggtgtaatttatgagcattattgtagcgatatgacacgtactattaaatttggtgaacctagcaaagaagcacaagaaatttataatattgtattagaagcagaaacatctgcaatccaagcaattaaacctggaataccattaaaagatatcgatcatatcgctagaaatattatttcagaaaaaggttatggtgaatatttccctcatcgcttaggtcatggcctaggattacaagaacatgaatatcaagatgtttcaagtactaattctaatttgttagaagctggcatggttattacaatcgaaccaggtatttatgtacctggtgttgcaggtgtaagaattgaagatgacatacttgtcactaatgaaggatatgaagtattaacacattacgaaaaataaggagtgggataaaaatgaaaagcttgttacaagcgcattctcattcagtcaaacactgccaatataacattgtagcgcctaagacataaatttttatccaagtctaaatgcaatatgtaacaaacaagctagaaacacatatgcaggtatgttcatcagtaacatgtaatgaatcaaatcaatatcattcatgttcgatgatttcttcgcattgtttctagctttaatttatcattatttaattttaataaccaaggagatgataacgtcattctttagtacgctgtaatccattcccttttcatcaaattcaaattataattgtaatgcttcttctacagatttatattccatttcaaatgcctctgcaacgcctttattggttacgtgacctttgtaagtatttaaacctaatgataatggttgatttgatttaaatgcttctctataccctttattagctagcatgagcgcataaggtagcgtagcattatttaaagctaacgtcgaagtacgcggtactgcacctggcatatttgcaactgcataatgaaccacaccatgcttaatatatgtaggatcatcatgtgtcgtaattttatcagttgtttcaaaaataccgccttgatcaatagcaatgtcaataataactgacccatttttcatttgtttaatcatgtcttctgttacaagtcttggcgctttagcacctggaattaaaactgcacctattactaaatcactttgtttaacatacaactcaatattcaacggatttgacataattgtatgtacacgtccaccgaataaatcatctaattgttgtaaacgctttggattaacatctaaaatcgtaacatctgcacctagtcctagtgcaattttagctgcatttgttcctgcttgaccaccaccgataatagttactttacccttaggtactcctgggacaccacctagtagaattcccataccaccattaagtttttgtaggaactctgcgccaacttgagctgacattcttcctgctacctcactcattggtgataacaatggtaaagatcggtctggtaactgcacagtctcatatgcaatactaattacttttctatctatcaaagcttgtgttaatttttcttcatttgctaaatgaagataagtgaataatacaagcccttctttaaaatatggatattcagattcaagtggttctttaactttaataaccatatccacatcccaaacttttgcttgttcagcaacaatctcagcacctgcttctttgtaatctacatcttcaaagaatgatcctgaacccgcatttgtttccactaaaacagtatgcccactttctactaaagcgtgcacaccacttggtgataaaccaacacgattttcattatttttaatctcccttggtataccaattttcataccatccacctccataatcatcttaacgcgaacattttgaaagcgcaatcaaaaatccacaaaattgtaaaggttattacactgacttttccgaaaattgtggtaaaatataattaagaaagaacaaggaggcacttactatgattacttacaaaaatattttaatcgcagttgacggttcacatgaagcggaatgggcatttaacagagcagttggtgttgctaaacgtaacgatgcgaagttaacaattgtgaatgtaattgattcaagaacgtattcttcttatgaagtttatgatgctcaatttactgaaaaatctaagcattttgcagaagaattattaaatggttataaagaagtagctactaacgctggtgttaaagatgtagaaacgcgtctagagtttggctctcctaaatctatcattcctaaaaagcttgcacatgaaattaatgcagacttgattatgagtggtacatcaggcttaaatgccgtggaaagatttattgttggttctgtatcagaatctatcgttcgtcatgcgccatgtgacgtgttagttgttcgtactgaagagttaccagcagacttccaaccacaagttgcaacaactcaattacgtgaaaaatatcaaaattaaatatagatgatcattagataactacttgatcattatgaaccaagtgcaactttctgcacttggttttttattgtttataaataaaactcacttaataatgttttcataatcttcttcgactacttaattctttaagatattcgtgaaaagagacattacactagttaattttcaaacaatacaaaaagcgtctacctcctacatataattgtagcggagatagacgcttaatatttatttaaaaattattttaaaccaccgaatgtcataacatcacgggcaatcatactttcttcatctgttggaataacgacaactttaactggtgaatgaggatagttaataaatccttctttaccacgtagtaagttttcatttttcttaggatcccagtaaacacccataaattctaagccttcaagaactttcgcacgaatttctactgagttttcaccgatacctgctgtaaatacgataacatcaacaccatgcattctcgcagcatatgatccaatatatttgtgaattttagaagcaaatacatctaaagccatttgtgaacgtgctttacctgattcagcttcttctgataagtcacgtaaatcactagatgtacctgataatcctaataaacctgattctttgtttaagatttccaatacttgttcagcagttttacctgttttttccataataaatggaattaaagcagggtcaatattaccagaacgagtacccattgttacaccagcaagtggtgtgaagcccattgatgtatcaatagatttaccgccatcgatagctgcaattgatgctccattaccaatgtgacatgaaataatacgtaaatcttcaattggcttatctaacatttctgccgctctttgtgatacaaatttatggcttgtaccatggaaaccatacttacgaatgccataatctttataataatgatatggcaagctatatagatatgctttttcaggcattgtttgatggaatgctgtatcaaaaattgccacatgagggatatttggtaataatttacggaaagcacgaatacccatcaagttagctgggttgtgaagcggtgctaattcgcttaattcttcaatttccttttcaacctcatcagtaatagctactgattcagggaatttttcaccaccatgtacaacacggtgacctgttccatcgatatcgttaatatcattaataatattgtgcgctttaaaagcatccaacatgatatcaactgcctcaacgtgatccttgatatcttgtactgttttaactttttccccgttgacttcaattgtaaaaattgaatccttcaatccgattctttctactaaaccttttgttactaattcctcttcaggcattctaattaattgaaattttaatgatgaactaccagcattgatagccaagattaattttgacataagtaatgatcctccatcgtttgctttttatactatttcatttttcattttatcattcatacagttttatgactatactattacagattattttttaggacgatttgtgtccatccactgatttaactctgtcataaatccttgaaattgtgaaggaattttgaaatcaggaatatttgccaataatacttcaactggctttgtttcacccgattttttcttttgtaaaattaatatagattttcgcgctttttcatttttaaataaagttggtggtaaatttaaaaatgcttgcatctctgtctctgttgcaatatatttttcaagctgttttacatgttcacctgtaaaaatattacttggtaccactagaaaggcatatccagcatcttttaatgcatttattgcttgttctattaataaataatgtgaataactatgtccttcttcaaaacctagcttaaactccttacttctttcatcaattggataatagcctactggaaaatcaccaataacgatatctgcttcttctaatggtagtggcatgatggcatcttgaggatacacatcgaaaggaatttctaagaagtttgctaaatgtacactaacacgtgataaaactggatcaacttcaattaaatgatgcataaccgcaatttcaggtaacacttcttttacagtagcacttaaatgaccggcaccacttgcaatatcaacaatatgtaattcttcttggttgttcataaaacgctcaactaaaaatcctagtatcaatccaattgaatctggtgtaatttgatgatttgcttgtatcttttcttcctgcattaaacttaaatatgcaaattggaatgctttacgtcgatcttgtaacgtcgattgttctaacaatcctctttcattggtatatacttgttccattgctagcccaagattttcaataaaactttggccattttcattatttaatgttttagctttttcatctaatgtatgaaacaagcgttccataattgtttgttgttctgccatattcgtccctctccaataaaaagtgcccataggtcttagcaatcatagaaaacaattctattttaatgctgttgacaacgatggacacgatgtatacattttaagatttatctctttaatgattaaatatttttgtatgcagctaaagcagcatcaaaatctgggaaatcagtaccttcactaacgatttctttataaacaactttattatctgcatctaatacaaatactgcacgagctaataagcgaagttcttccataacaacgccatagttttcaccaaatgataagtcacggtggtcacttaatgtaatgacattgtctaaacctgctgaagcgcaccatcttttttgtgcgaatggtaagtctgctgaaattgtaagcacaatcccctcttctttagaagcatcagagttgaatttgcgagtctgctgatcacaaacacctgtatcaattgatggtaccacactaattaatttctttttaccagcataatctgctaatgttacttgatttaagtcattatctaacactgtaaaatcaggtgcaaaatcaccttcattaatttgttgaccttttaagtggattggtccacctttgaatgttatttcagtcatatacttgacctcctgcattttaaaattctaactacatcatacgacaatttatggtttgattacaattttcatgctttaatcaaaagcaaatttaattttatacaaattgttgaatataatcaaaagcattttttaaaattaaaatagcagtaataataataaataatacttttacataaccaacaccttgtttaatagcaaaatgagccccagcatatgacccagcaatcatacttatagccataattaaacctattacataatctacttgtcctaataccataaataatacaagcgcacctatattagaagcaaagttcaaaactttagcatttcctgctgcacttaaaaaatcaaaaccaaagactaacaatacaaaaagcataaatgaacctgttcccccacctacaaatccatcataaaagccgattaatataaaaagtgctgcaaatattatggctttcttaaatgtaaattgagtaaacgtgcgtgtattgccccaatcttttttaagtaatgtgaatataaacaccgacgaaagtgcaatgatgattaaaggtttcaatatttgtgacggaaccatcgttgcaatatatgcgccacatgcagatgccaaaaatacaaaaccaaataatttggcaacaacatataagtccactttaccggaccttataaactttatcgtactagttaaagaaccaaacgaacttgccaatttatttgtacctaaagccacagatggtggtagaccgattgctaataatgctggcgtagaaattaaaccgccaccccctacaaccgaatctataaacgccgcgataaaaccaaataaaattatgattataatcatcgttaagttcaaatccatagtttaacatccccttatgtttaaatttactctaggattttatttataaaaagtcgtttattaattggtttgtttgctgttctttaatagttttataatcactagttatttcaagtgtttcaatattttcaacagcacgattaatcatctcttcaaaatcaaagacactttcatattggactaccttatcaaagtttggttcggttactggatttttaggggtgaaaattgtacaacaatcttcaaatggttgaatagatgtttcaaatgtaccaatttctttcgatttaataataatttcttctttatcgtaagttaataaaggacgtaatacaggagtagaagttacattattaattgcatacatgctatgaagtgtttgactggctacctgccctaggttttcaccatttacaatagctaaagcccctatttgatgtactaatttatcagcaacacgcatcatcatacgtctcgttgaagtcattgtatatcttggatgtacaactttatttacctgtttttgcaattctgtaaatggtacaatatgcaatttaattggtccaacacgttcagctaaaatacgtgtcaattcaataactttttcttttgcttgatcacttgtaaatggtggactatggaaatgaatcgcttcaattgttacgccacgtctcatcacttccatcccagcaactggtgagtctataccgcctgaaagcattagtaacgtcttaccaccagtaccaactggtaatccacctgaacccggaacaacttcttcatacatataaattgcatctaatctaacttccactcgaatttcatgatctggacgtttgacattcactgaaatattgtcgaagtgcttcaatactgcaccacccaattcacgctgtaattcatacgtatccattgggaaatttttatcggcacgcttcacatcaattttaaatgtgctgttttcttcaaattgctgcgcaaatttaattgccgctgcacttattgcctctattgttttttctacttttaatactggactaatagatttaataccgaaaatttttgataatcgatatgttatttcatttatatctgcatggtcttcaagttcaatatacatacgatctcgtttgcctttaacgacaaacccatcaagtccttttaatgacttatttacattatttcttaattgatttacaaatttctttctatttgaaccctttaatgttaactccccgtatctaacaagcaagtgatcatacttcattattttagcaactccttaatttcctcataaatgatgataaatatttctttaaacctcgctatatcttctttagttgtagtagccccaaatgataatcttatactaccttcaatagatttgtctgataatcccattgcagccaatacttcatttaatttattacgtttagatgaacaagcacttgtcgtagatatcataatgtcatattttgaaaaagcattaactaatacttcaccttttacgccaggaaaactaatatttaaaacgaatggtgaacctgaagttgaagaattaatataaactccatgatatttatttaaaaattgacggacgtcattatttaactcagtaacaaatgcattcaatgcttcaaagttttcattagctatcttcatcgctttaaccattgcaatatcatttggcaaattaactgttccacttctaacgccatattcttgaccaccaccatggacagttggttcaacattttgaatgtgatttacaagtaagacgccttgtccttttaaaccattaaacttgtgtccacttaaactaatactatctatgttattgagatccattgaaattttgccgaatgcttgaaccgcatctacatgaaaatgtgccttaggataattttttataactttagccatttgtggaataggctgtatttgtccagttacattatttacatacatacatgttactaaaccgactttgtctgacattaattctttgaagtgttctaagttaatactgccatctttctttacatcaacatatttaactttaaatccttcgtgtgcttccaaatatcttacaacctctaatacggacggatgctctaacacggatgtaattatttccttcgctgtatcaaatttacgataggcaataccttttaaagcaagattattggattcagttgcaccactagtgaatacaacatcataatttgtttttgaattaatcattgcattaatttgggtttttgcttgttgtagtaattgatttgcctgcaaaccagctttatgcggactattcggattataatacattgattgatttacttttaaataagtatctaacacttcttcaaatgctttcgtcgttgccgcattatctagatatatcaaaataaacacttctctttcattaatcatcaatcgttaaaattgttttactcaagcattatactattatccgacaaaaaataaaggttatagcgcaaaataatcttatttctacttattaaataagaattagactatttcactctatttaaacagctgtgtgattatgcttttttcactacttatattaattaaaacaacacatttgattacgtttatctttaaacaattgctatttatatttattgtccctttcatttatccatataaaaaagaagctagacaacgtatcgttggctaacttcaattattaaactcatcagtccaatttgacagagtgctcatattatttaagtataactacatactagtttctattgcttaataacttcttcttcaatatgtttagtaacacctggctcaacactttcaagagcttgctctgcaatttcaatcgcacgcttatagcgattatttttaaataatcgttcagcttcatttaagctcttatcaacattgctatagtccttacgatatctatttccatattgaattaatttctctgcataaacagcattaacaagaacatcatttgcttcatcttcaaatgtattcatttgaatcacaattttagacactttatcttttaactgtttaacgtgtattggacgttcactaaattgttcgttaacatcacgaacttcatgatcaatttcatttttcatgatgataaacctttcaggaacgcttgttaagttagaagcaagtaatcgacgatacacttcttctttcttcgattgtactcgtagcagattgtcttctgcttctgcttcatcttcacgcaattgaatcagatgattttgtagcttttcttgtttgtcattaataactgtgacatgatcttctaaatattgtaaattatcctgaacctcgctatatcgcacagcagatttagacatttcttttaaaatatcatcatatacagaaattaaactttgaatttcattttcaaattgacgaacactctgagcatcagattcatttatatagtagttttcacgtacatattcaatttctgtttgcaatgtataattcatgtctttagctttgaataagttatccgtaatgatatcttttgtttcttcgacatcatttttagctttaacttcatgttcaattaaatcatacatgtcatctaacttatcattgatattagctagtttatcattagcttcttctaattctaagcggctaattaatggttcaacgaaactaagctctgtttttaagctttgtaatgtactgtctactttcacgtgatccagatcatacccttcaactttaagatcacggcaaccatattttaaatcttggaattgaccaggtaattctttttgagtttctctaattaattctggtatttcttccatataagatcttagctgtttcatttgttcattcaaggcagctatatggttgtgcgcttgtacataattaccatcagtttttagtacttcatattgctctaaccttggctcaaatttttcaatttcagtttcaagtagacttgctgcctcaccaaattgatgacgatttgctaaaacatcacgtttcatttcacgataatcaaccttacatttgtcatataattcatcattatctttgtataacgcaataatttcatttacatcttctaattgttgctgatagctttgttcgtaactatccatcaactcatttgcatcatcaatttcactttgagatgcgttgaaactaaatttatctaataaagcctcagcattatggattttttcttccacaggagctagatacttatttgtactttctacgttgtcctttttcattgcatcgtatttcgtttttgtttcaccttttaaattcaacttagataattgtgcaaggttttgatcaaaaggtaacgtctcaatttcatttttacgttcgattgctttttcaataatttgtcgtttatttgaacgtaaatagaataatacacctacagcaatcaatataatcacaattattgccaaaatgatatataacaccatatgcttctcctcctaatttatcattactattataacgtaattttgcttaaggataaattataaaatgaatttattgccataatattttcgaaattctatactattataaaatctatgaaaataagaggttttaaatatgacaacaattaacccaacaaactacacattattaaagaaacaagcagcaagccttattgaagatgaacatcacatgattgctattttaagtaacatgtctgccttattaaatgataatctagatcaaattaattgggttggcttttacttattggaacaaaatgaacttatacttggacctttccaaggacaccccgcttgtgtccacattccaattggaaaaggtgtatgtggtacagccgtttcagaacgtcgtacacaaattgtagctgatgttcatcaattcgaaggacatatcgcttgtgatgctaatagtaagtctgagattgtcgttccaattttcaaagatgataaaattatcggcgtcttagatatcgatgcccctataacggatcgatttgatgacaatgacaaagaacatcttgaagcaattgttaaaattattgaaaagcaactcgcataaaaggacatcagcattttcaataaagtgttgacagttagcaggaaaatgttacaataatctttgtgtgaattaacgaaagtagcagttgtatattattgagcgctatgttgttcccaatgcggacgtgtcacgtaactgtcgctataaggtgaagacacataaaacaatatatcttagtaagcatgcaacactcttttttgtttattcataacaacaaaaaagaattaaaggaggagtcttattatggctcgattcagaggttcaaactggaaaaaatctcgtcgtttaggtatctctttaagcggtactggtaaagaattagaaaaacgtccttacgcaccaggacaacatggtccaaaccaacgtaaaaaattatcagaatatggtttacaattacgtgaaaaacaaaaattacgttacttatatggaatgactgaaagacaattccgtaacacatttgacatcgctggtaaaaaattcggtgtacacggtgaaaacttcatgatcttattagcaagtcgtttagacgctgttgtttattcattaggtttagctcgtactcgtcgtcaagcacgtcaattagttaaccacggtcatatcttagtagatggtaaacgtgttgatattccatcttattctgttaaacctggtcaaacaatttcagttcgtgaaaaatctcaaaaattaaacatcatcgttgaatcagttgaaatcaacaatttcgtacctgagtacttaaactttgatgctgacagcttaactggtactttcgtacgtttaccagaacgtagcgaattacctgctgaaattaacgaacaattaatcgttgagtactactcaagataatacgttcaatacaaacacccacaattgtgggtgttttttttattaatttaaaaatgatagattcaaaattatatggagctaccctattttacaatcaacttagaatttacaagtcttatttgtttaattatctttagtatttcatcattagtttttaaaattatcaattgcgatatacgaatcctcatccctctatcaaattaccattcatcgtctcacttaataaataatttcggattatctgtaattaatccatctacacccatttgtcttaatttttctccagttttcaatttattaactgtgtatggcataacctgtaattgatgatgatgtgctttatcaacaaattttctggtcactaatgcataattaggattaacataactagcaatttgagcaattcttgaaaagtttggctttttataccaataattacgtttactacaaagcacacctaattcatatatactgcccaatgtgtttaacttttcgatgcattcgatatcaaaagattgtataactacttgtgtcgcatcgactttcttttcttccaaaaatgccagcaatttacattctatttctggatataaattcggacttttcaattcaatcaatagctttttatcatactttaagcataatgaaagtacttcatctaacgtgggtattcgttctcccttaaaagcaacatctttataactaccaaaatcaaatgattttaattgcgataatgtgtaatcagcaatacgccccttaccatccgatgttctatcaattgtttcatcatgtatcacaacaaaatgttggtctttggtcaaatgaacatctatttctaacatagcaacattgagccccattacctctcgataaccgaccattgtattttcaggaaaatcactcggcaatccacggtgcgaaacaatttgtaattcatctttcagtttattcagagtcattgataagtcacctttctgttaaactttgataaactattctaaaattaaactatcacaattatattggaggttaaagcaattgcatcaacatgactttaaagtccaaacttcttggcaaggtggtcgtaacaatgtcggaaacgttcaaggcgacatactttcagagaatatttctatacctgcttctttaggtggtgttggtataggaacaaatcccgatgaaatgttagtatcagccgcttcatcatgttatatcatctcattagcagctactcttgaacgtgcaaagttcacagatatttcaattgaacaacaatcgattggaacagcttgtttaaataacggaaaattcagtatgtcaaaaattgtgcaccatcctcaaattcaaattccaagtgatcaaatagcacaattagaaaagcgattaccaaaattgataacaattgcagataataattgcatgatttcaaatgctgtaagaaataatgtggacataaaaatctatcccatcattcaggccaaataaaatcgttaagtgataacgtttgttcgacaatatagcgttatcacttttttaggcttttaaattttcagaaaatttgctaaaatagtgaaatcttatttataggaggcatataaatgtattatcatcaaccgttgttattaacacctggcccaacccctgtacctgatgccattatgagagaaattcaagcacctatggttggtcatcgttctaaagattttgaagacatcgcacaacaagcatttcaaggtctaaagccaatatttgggagtcaaaatgatgtacttattttaacatctagcggtacaagcgtcttggaggctagtatgttgaacattgtaaaccctgaagatcacttcgttgtcattgtttcaggtgcctttggtaaccgatttaaacaaattgcacaaacttattacaaaaatgtgcatatttatgacgtaacatggggagaagctgtagatgtcaaagatttcatcaatttcctttcaactttaaatgttgaagttaaagcagtatttagtcaatattgcgaaacatctacgacagtgctacaccctattcacgagttaggaaatgccattaatcaatttaatagtaatatttattttgtagttgacggcgtaagttgcattggtgctgttgatgttgacattaacaaagataaaattgatgtacttgtttctggtagtcaaaaagcaattatgttacctccaggattagcttttgtagcttatagccaccgtgcaaaagaacatttcaaagaagtaactacgccaaaattttatctagacttaaataaatacatttcgtcacaagctgacaattctacaccgttcacaccaaatgtgtctttatttagaggtgtaaatgcatacgttgaaaccgtaaaagcagaaggtttcaatcacgtaatagcacgacactatgcaattagaaatgcattaagaagcgccttaaaagcattagatttaactttattagtcaatgataaagatgcatctccaacggttacagcattcaaacctaatacaaatgatgaagtgaaaataatcaaagatgaacttaaaaatcgctttaaaataacaattgctggtggtcaaggccatcttaaaggtcaaattttaagaattggtcatatggggaaaattagtcctttcgatattttatcggtagtatctgctttagaaattattttaactgaacaccgtaaagttaactatatcggtaaaggtatatcaaaatatatggaggttattcatgaagcaatttaatgtactcgttgcagatcccatatcaaaagatggtatcaaagcattattagatcacgaacaattcaatgtagatattcaaactggcttgtccgaagaagcattaatcaaaattataccttcataccatgctttaatcgttcgtagtcaaactacggttactgaaaatatcataaatgctgctgattctttaaaagtaatcgcacgcgccggtgttggtgtagataatattaatattgatgctgcaacattaaaaggtattttagttattaatgccccagatggtaatacgatttcagctactgaacatacactggcaatgttattatcaatggcacgaaatattccgcaagcacaccaatcacttacaaataaagaatggaatcgaaatgcatttaaaggtactgagctttatcataaaacattaggtgtcattggtgctggtagaattggtttaggtgttgctaaacgtgcgcaaagtttcggaatgaaaatactagcttttgacccttacttaacggatgaaaaagcaaaatctttaagcattacgaaggcaacagttgatgagattgcccaacattctgatttcgttacattacatacaccactaacacctaaaacaaaaggcttaattaatgctgtcttttttgccaaagcaaaacctagtttgcaaataatcaatgtggcacgtggtggtattattgatgaaaaggcgctaataaaagcattagacgaaggacaaattagtcgggcagctatcgatgtgtttgaacatgaacctgcaactgactcgcctcttgttgcacatgataaaattattgttacacctcatttgggtgcttcaacagtcgaagctcaagaaaaagtggcaatttctgtttcaaatgaaatcatcgaaattttaattgatggtactgtaacgcatgcagtgaatgcacctaaaatggacttaagcaatatagatgatactgtaaaatcattcatcaatttaagccaaacagttggtgaattagctattcaattaatgtacaatgcaccaagctctattaaaattacgtacggtggcgacttagcctctattgatagtagtttattaacacgtacaattattactcatattttaaaagatgatcttggtcctgaagtcaatattatcaatgctctaatgttgttaaatcaacaacaagtgacattaaatattgaaaataataaagcagagacaggttttagtaactacttagaggtagaactatcaaacgatagcgattccgttaaagttggcgcttctgtctttacaggtttcggtccaagaattgttagaattaataatttttctgtagacttaaagccaaatcaatatcaaattgtgtcatatcataatgatactccaggtatggtaggaaaaactggcgcattgttaggtaaatacaatatcaacattgcatctatgactttaggtagaactgaagcgggcggagatgcgctaatgattttatccgttgatcaacctgtttcaaacaatataattgatgaacttaaacaagttggtgaatacaatcaaattttcacaactgaattgacggtacagtcataaacaatttatgtaaattcaaaatgccaagaagacattggattacttccattgcttcttggcattttttcattattaatttcattgtaactcaatatgaaacctttggttcaatcattcactacaagttatgctgtcaaacaacaatcaaattacaaattatctagtacacctctaagttcacctaaatgattaataacatagtcggcatgatgcgcttctaactcacctgcagcatccttaccttttaaacctgttaatgttccaataaacgttgcacctattttttgagcacttaataagtcagctaacgaatcgcctactataaatacgtcatctttatttacaatgttatcttgcttattgatataagattcatatttatcgcgattattaccatataaagctgcgatataactaaaaggattcggctttcctaatggtcgtgcttgcggatacatattctctgcttctaaaacatcacttgctgttgcaataaaatcagcttcaaaatatggtaacaatcctaaattttcaaatggcacaacagtctcagtataaggacgacctgttgcaatacctaattcgaaaccagcaccttttaaatcattcagaagtaccttaacttcatctactggtctcaaaataatttcttgataaatataacctgtcttaaaagtagttcgtgctattttcttttcaacatcttcatacaacttcgatcctaaataccattcttgataaacttcttgcgctaacgtccataatgcacccttcaaactaaataaagtagcatccgaaacatgtaactctgttgttgcaaactcttccaaagcagcataaatattatttttaccaacttttacattatccaaaaattgtaaaggtagttgttcatttaaattaaaacagtctgctaagtttgtgcttatattttgcaacttcaattcgacaggctcatcttgatacatgaatgcctcaatttcatcatgtgataactttttcaaaatatcaattaaatgaatactaaaaacgataaataacatatcccaatttgaattcagccctagcgattttaatttgtttaaaatcttatctttttgaaaaattcgattcctaatgtcttgtatatcgttatcagtcaaagtttcccaatctatatgtgaatgaagacctaaataacacttatccattaataattcatataccgttaatgcagagacatcgaaacaacgttcttcacttaaaaaaacgccatcaacatcaaataaaattttcttcacaatccccactccatttctgaaaattcagatataaatcattctactatttgactaaaaaaagcgcaaaccctattgaagttagatttgcgctttagctgtttaaattttataaatgtttttcaatttcatcagcaacctgctgtacgtgtgtaccgacaataacttgagttgaatgtttgccattaacagtaacaccaactgcaccggcgtttttaatcttctgtttatcaataatagatgtgtcttttaactctagacgcaaccttgttgcacaattggttaaattaacaatattctcttgaccgcctaaaccttctaatatttgtatagcatgttgatgatatttactttgtttaatatcattttcaccaggagcaatattatcttttacaactgttgggtcaactaattcattttcacctctaccaatcgtattcaagttaaatacttggattactacacggaaaatcacatagtataagatgaaaaatacaacaccttgaacaagcaacatcaatggatgatttgatactggattaattagtgataacacataatctatcaaacctgcactaaatgaaaatccagctgtccaatggaatgtagctgcgataaataaagataatcctgttaataacgcatgaacaacatataagattggcgcaacaaacataaatgcaaactcaatcggctctgtaacaccaacgaaaaatgctgcaactgaactcgctaggaaccaaccgtaaacttgttttttctgagtagttttagctgtatgatacattgctaacgcagccgctggaataccgaacatcatgattgggaagaatcccgcttgatagcgtcctgtaataccttttatagcatctttgccactttggaatttaccaatatcattaataccaatcgtatcaaaccagaacacactattcagtgcatgatgtaatcctgtaggaattaataatctattggcaacaccatatatgaaagctccaaacgatcctaaaccgactatagattcaccaaattttacaatccatgaataaagtagtggccataagaataacaatatgacaactaaaaatgtacagtaaaatgcagtcataattggaactagacgtttaccactaaaaaatgataatgctaatggtaattctgtttcactaaacttattgtatgcataagctgctattaaacctattacaataccaacaaagacattgccattattcatcttttcaaaagctgaatttatttccgaagctttcattcctaataaaggcgctaatttcattggtgataatacaactgtaactaaaaaatatcctaacgtagctgcaagcgcgactgcaccatcatttttctttgccattcctatagctacaccaattgcaaataaaatacctaattgctctaaaatcgtagtacctaccgtagtaaagaacattgcgattttcggcgtcgcatgaagtgcatttaacgtattaccaattccggcaataattgctgcagccggtaaaatggcaactggtaacattaacgaacgccctaaattttggaaaaatttatacattgaatgtcatccttcttaaaataatgtagaaatataaagattactaatgtaactagaataactacttcgatactccgttatagtcacctaggcttactaaccagctatatttctacctcaagttattttataaactttttacaatttcatgcaattcttgttgtaactttgctgttcgtgtttcaatctcttttgtaatataatcgatacgctcgtttcgttttaaatctttaggtaaatcgttaatatcgattggtttgccaatatttatgtatgcttgtcctgttaaaagaccgtgaatcttagtaggaccaacataagcaacaggtaatattggtgacttacttaacattgcaattgttgaagcaccacgtttcaaaggtgcaccttcttgcgatgtgcgagaacctgttgggaagataccaactgtcttattatctttcaacaaattgattgggcgttttaaagtactaggtcctggattttcacgatctacaggaaatgcatttaaagacgttaaaaatttaccaatccatttatttttgaataattcttttttagccatataatgaatttgattaggatataatgccatacctagcataatgacttcgttataactttcatgcgtacaagttacgacatatttactatccttaggaatattatctttaccgattacgtataatgattttgacattttaactaaaatgaaattcaaaatcttactaatcactgaatacattgtgccacctacttaacttatttgtttataacaactagattttatcactatatttttactagaacaagatagtctgaaaatacatctaaagttgtatagtgtattactagcaataattataaaaaaaagacataattaaagcatatataaatcatataatggaggttaagtatgtcagattttaatcatacagatcattctacaacaaaccatagccaaacacctagatacagaagacctaaatttccatggtttaaaacagtcatcgttgcattgattgctggaattattggtgcacttctagtacttggtataggcaaagtattaaatagtacaattttaaataaagatggttcaactgttcagacaacaaataataaaggtggcaatcaattagacggtcaaagcaagaaattcggtaccgttcatgaaatgataaaatctgtctcccctacaattgttggagttattaacatgcaaaaagcatcaagtgtagacgacttattaaaaggcaaatcatctaaaccatctgaagctggagtaggttcaggtgttatctatcaaataaacaacaattcagcttatatcgttacaaacaatcatgttattgatggcgcaaatgaaattagagtccaattacataataaaaaacaagttaaagcgaaattagttggtaaagatgcagtaactgatattgctgtacttaaaattgaaaatacaaaaggtattaaagcgattcaatttgccaactcttcaaaagtacaaactggcgatagcgtattcgcaatgggtaacccattaggattacaatttgctaactctgtaacatctggtatcatttcagcaagcgaacgtacgattgacgctgagacaactggtggcaatacaaaagttagcgttcttcaaacagatgctgctattaacccaggtaactcaggtggcgcattagtagatattaatggtaatttagttggtattaactcaatgaaaattgctgcgacacaagttgaaggtatcgggtttgctattccaagtaatgaagttaaagtaacaattgaacaacttgtaaaacatggtaaaattgaccgcccttcgattggtattggtttaattaatttgaaagatattcctgaagaagagcgcgagcaacttcatactgatagagaagacggtatttatgtcgccaaagctgatagtgatattgatcttaaaaaaggtgatattattacagaaattgatggcaagaaaattaaagatgatgttgatttaagaagctatttatatgaaaataaaaaacctggtgaatcagtcactgttaccgttatccgtgatggtaaaacaaaagaagttaaagtgaaattaaaacaacaaaaagaacaaccaaaacgtcaaagccgatcagaacgtcaatcacctggccaaggcgatagagatttctttagataatttacagacagaaaagtacattaagagcctactcattacattcttaggaatgaatatgagtaggctctaatttatttagctatgcaattatatttattgatagttaaccatgaagtattttttcttaccgcgacgaataatcgtaaattcgccatcaattttatcttctggtgctaaagcataattaacatcttgttgtctctcaccattaatataaatcgcaccattgttaacatcttcacgtgcttgtcgtttagaaggagaaatgcctgtttcaataaggacttcaacgatatttgttgtgtcatttgataatgtcacttgaggcacatctttaaatccatcttttaattctttcgctgataatgattttaaatcaccactaaataatgcttgtgaaatacggattgcatcatttaatgcatcttcaccatgaataaatttagttacttcttcagctaatgttttttgagcttcacgtaaatgcggtgcttcatttttagattgttctaagcgatcaatttcttcttttcctaagaaagtaaagtattttaagaatttaattacatcttcgtctgattgattaatccagaattgataaaattcataaggacttgttttttcagcatctaaccaaacagcacctgactcagacttaccaaatttcttaccatctgatttagttacaagcggaatagttaaaccgtatgcgtctgtttgaccatacatacgacgcattaattcaataccacttgtgatattaccccattgatctgatccacctacttgaatcttacaattcaattctctattcaaatgaccgaaatcaatagcttgtaaaatcgtgtatgtgaattctgtatatgaaataccatgttctaaacgactttggattgaatctttacctaacatgtaattaacgccgacgtgtttaccatagtcacgtaaaaaactaattaatgagatttgtcctaaccagtctctattattaacaagcactgcaccatggtctgttccaaattcaaaaatattgtgcatttgcttactaataccttcgatatttttatctacttgttcttctgtttgtagcacacgttcttctgatttacctgatggatcaccaatcatacctgtaccaccgccaattaaaacgataggacgatgtccatgttcttgaaaacgtcttaatgttaagaatggtagtaagtgaccaatatgtaaactatctgccgttggatcggcaccgcagtataacgtcacttgttctttatttaataaatcttcaataccttgttcatcagtttgttgataaataagacctctccattttaaatcttcaattaatacattcgtcattattatttcctcctatttataattatttattgaatacttgttaaaatactttaaagttttttgaacgtaaaaaaaacccttacaacaaatatgtaagggcgcgattgcacgttaccaccaaacttaaacataatcataagataatgttcactctattaatgatacgttcattaataaacgtaggacatgttagttataaaggtgtattcatattattaaaaacactagttcacagcgaccactagctctctgatgatttcaaataatattacttgtccttttatcctattctttatgcattttccctaattataattaacgttaaaataaaagtcaaattgcttaaatatggtatactatacgtaatttaggaggttaaagatgacgaatcaagacaacaatcatcaattgaatcatcgtatatatcattttgaaaagatatataaagctatcaaacatgtcattgtttttatatttatgattttcattgccatcgttgctatcgctgtgattgcgatgtctttatattttcatcatttaactaaaacgtccgactcattatcagatgatgctttaataaaaaaagttcgacaaatacctggcgatgaattattagatcataataacaaaaatttattatatgagtataaccattctcaaaactcactcattataggccctaaaacatcaagtccaaatgtcattaaagcattaacgtcatctgaagacactttattttataaacatgatggcatcttaccaaaggcgattttaagagcaatgatacaagatatttttaatactgatcaaagttcaggtggtagcacaattacacaacaacttgttaaaaatcaagttcttaccaacgaaaaaacatatagtagaaaagcaaatgaacttcgcctagcaattagattagaacacctactctcaaaagatgaaattatatatacatatttaaatatagttcccttcggtagagattataatggcgctaatatttccggaattgcatccgcttcatatagtctatttggtattccaccaaaagatttatcaattgcacaatctgcataccttatcggtttgttgcaaagcccatatggctatacaccctacgaaaaagatggaacgttaaaatcggataaagatttgaaatatagtattcaaagacaacattatgtattaaagcgtatgttaatcgaagatcaaatcactgaaaaagaatacaacgacgcattaaaatatgatattaaatcacatttgttaaatcgaaaaaagcgttaattgatgctcactttttaaagtaaccacaacaatgaatccaaatattaaaaacagcagtaagattattttcaattagaaaatttctcactgctgttctttttatttactctaaaggaaagccattaaaccaatcaatagtttataaattaattgctttcacattgtctacaaagttaatcatacatatgctatatttagttaattatttagattcttttctgaatttaggaatgaataaagctaacatacctaataacgcatataagccccaccatgattggcttgaagttgtttctccagtttttggtagcattttagattgactaagtttgttttctttcgatggtgtgccggctttttcttttgttttcactgttttatctacagttttatgaatatcactcggcagatgttcagttgtttttttgtcagtaactttgtctgtattattataattttgtttcactacgtcaagctttgctgcttttccagtatgattatttttatcggcaatatgattcagctgtatgactttgtctttatttttattagagtctttatcagtatcgacattagatgacataccaacgctattatcggcatctttatccacatttctatcagtatctttggcaatttgagtatccatttcttttaaatcatatttatcgaagtgattattatccgacatatcggataaatgatcaacatcatgttgcacatctttatcaatattattatcagcatctttaaccacgtcagactctggttctatcacatctgctttatcagacgcatctttaggatttgttgcagtgctgctattttcagctacatctgtatcagcaaccttaccttcttgtcctgtttgtacatttagcggttcactcgtgttattttgtgatgtatcatcatcttttgtattgatatcctgatttataattctgacatgatattgaccttcataaccaatgtttgccacaacgactttaacaatcgcattgtaaactgctttgtcaggtatatatgggaaaatcagcgttctagaattatttttaggatctttagaaacagtagtgacacgtttaccttctacaattaaatctttccagtaactgtcatcctttgttttcatcactacatatttttgaccatttaaagttgctgtatagaatggatgttcaacaaagccgtccataactgactcactattttcttcactttcaaaaacaacaaaatgcgcttcttgtaaatctgttaattgatcatttgtaggtgtaacattttcaaattccgtcactgctgatttaacttgatcagctaactctactctagtttgatctaatttctttttatattccgccttatatttttctggcaatttctcttgtaatttttctaattcataaacttgtctttctaacgttttagctttgtgatacggagctaataatttttgtaaattgtatgtttcttcatccacatagtcgtctgggttattagtaataggctgtgcaaagaccattagcgtataatcatagtcttcatggatgttctcaccatattcaatagatgacacaattttaacttctctcgtaccattagatactgggaaacgaatataggcataatctttatcagaatcatatgatactaattcgactggtaactttttgtcaccttcataaacttcaaatttcttccatgttgaagctgtctttaaacctaattcaattattggtcctgtttttgtaaaaatgacagttgctggttcaacagtactagcataatgatagaactgtctttcacctttatcatttttcatttgaaaatcaattggtcgccaattatcagctgtatgttctttatcgatgatagccgggtttttaattgcatcttgtagtgattcatctgctggtggatactgttgattaacatccgactgattacttgactcattcgttttatcgttagtattaccattagaatttgtttcatgagctggttggcttgacgcttgatctgcattcgttgacgattttggttgtgcaggttgactcatattggtcgttgcctgcggttgattattagcattgttgatcgttgatgtattttgattagatgtattcgtgtttgtttgattacttgcgactgaacttgattgatcattcgttactactgcatcatttgtatctgattttacaagtgaaggatcgttataaataggtttagcaaatactaatttagtataatcataatttgtttcttctccatcatcaatttgagtcgaagaaacaattttcaattcttgtgtgccatctgaaactgggaatcgaatataggcatggtcttctggtacaggactatatgatacaagtctcactggcaatttttgattgttttcatagacttcaaacttcttccatgttgaagcagtattgatgtctaattcaacttctgctttctttttagtgtaatacacatctgctggatctttgatgctgaaaaagtgatagtactgcgtttcattgtttttatctaataactggaaattgacttgttctcttggacctatatcatgttctttattttctaatgcaggatctttaattgcatctttaagtgattcatccgctgcaggatagtttttcgcagtgtttgctggttgcgtagcaggttgtgtttgatttgtatccttaggtggctgagttgtagttgcattattattttgattttccgagattttatctgaagtatttgtattttctgctgcttgtgcttgatgttgagaagtaattaaaaatagtgtactgacaatgaccgatgcaacgcctagagttgattttctaatagaatagaaagaccttaattttgggtgatgtttgttcatgttgttaacaactcctataagattatatttaattgataataattatcaatatcaattattagtgttaattgtagcgcatcccaattaaatattgcaacctattttattaattttttttaatatggaatattcattgcatcgctttcctattcttcaagcccactttttatcttcatatacattaattaaccaccttcaaacattgtcgttagattcgccaaattgaatctatttttagcacagcaaaaaaccgaactgctgaaataatgcatctccaacagtccggtctattaaactatttacttatctttattaaacaattgacatgatttattagaataacccaattgcatgaccatcatcagtaacatccatgtttaatgctgctggttttttaggtaaaccaggcatagtcatgattgcacctgtcaacgctacgataaatcctgcacctgttttcgcttctaattcacgaattgtaatttcaaatcctgatggtgcacctaacaacgtttgatcatctgagaatgaatattgtgttttcgccatacatactgggtaattatcccaaccattttctttaaattgttttaattgtttttgcgctttactgctaaacgttacttttgaaccgccatagatttcagtcacaatcttttcaatcttttgctctaatggtaattctaattcatataaaggtttaaatgaattaggttgatcaatgacttctaatacttcatttgctaagtcaacgccacctttaccaccttttttccaaacttcagttaaggcaattcgtacgttattttctttagcccaagattttacatattctacttctgcatcggtatcatgtataaatgcattaattgcaacaaccggttctacaccgaattttttaatattattaacatgacgctctaaattaacaattcctgcttttactgcttctacattttcttcttttaaattatctttcgctacaccaccatgcatttttaacgcacgaattgtcgcaacaacaacgacagctgccggatcaaatcctgcttcacgcactttaatgtccatgaatttttcagcgcctaagtctgaaccaaatccagcttccgttacaacgatatcagctaaatcacgtgctgtttcagttgctaaaattgagttacaaccgtgtgcgatattcgcaaatggtccaccatgaactaatgcaggtgtcccttcaattgattgtactaagtttggttttattgcatcttttaaaatcattgcaagtgcaccttccacttttaaatctgcaactgtaactggcttgcgatctctagtgtaaccaatagtaatacgactaattttatcttttaagtctttaatacttctacttaaacataaaatcgccataatttcagacgctactgtaatattaaagccatcttcacgtggtacaccatttgtaggtccacctaacccaacgtttacatgtctaagtgcacgatcattcatatctaatacacgtttccactcaatacgtctttgatcgattcctaattcgttaccttggtgaatatgattatcgataaacgcagacaatgcattatttgcagttgtaatcgcatggaaatctccgttgaaatgtaagttgatatcttccataggtaagacttgcgcataaccaccaccagtcgcaccacctttgataccaaatgttggtcctaaagcaggctctcttaatgcaaccataacgtttttatttaactcatggaatgcatcagctaaaccaactgtaaccgttgatttaccttcaccagctggtgttgggctcatcgcagttactaaaacaactttccctttgttttctcttggcgtaattttattaatgtcgattttagctttgtaatgaccataaggttctaatgcatcctctgaaatacctactgatgcagcaatatccttaattggttgtagtgttgattgattcgcaatatctaaatctgataaatgagtcaacttttttcgcccctttttgtttaatttatgcatttataatatgtaagttgtagctaagaaatttttacttacattcatataataacgaactgttaaaaacttgtcgactaaatcgggttagcgctttcatttttgcaataaattcacttattaaagttttgtattatacaacttttagcgcttgatactattgataactatatttttctattatttaaaataatcatcttccaaagatcatattaaaaataaaaagcaatataaagatatgccattattgttatgtcatcattttcaaatgctttctacgaaatgatatgacacaagttaacagttctttatattgcttatcgtaaagtaaacgattatttaaacattgacatgaaatatgttgtcaccctttattcttcgaaaaaaatcttcaataacattcatgtcattattccattgtacttaaatccccagcatctaaatttaattcccaagcttttaatacacgtctcataattttacctgaccgtgttttaggtaatttatctttaaattcgatttcacgtggtgctgcatgtgccgacaaaccttctttaacaaatatacgaatttcttcttttaattcgtctgttggttcatatccttttctcagtgcaacaaacgccttaattatttcaccgcgaaccggatcaggtttaccaataattcctgcttcggcaactgcttcgtgttcaaccaatttagactcaacctcaaatggtccaactcgttcaccagctgtcataattacatcatcaacacgtccttggaaccagaagtaaccatcttcatctttatatgccgaatcaccagatacataccagtctccaataaaatatgatttatatttttctggattcttccagatacgatacatcattgatggccagcctttttttatagcaaggttgcccattcgatttggtggtaattcattccctgcatcatcgataattgcagcttgaataccaggtaatggtttgcccattgagccaagcttgacgtccatcgttggatagttaacaatcatatgtccacctgtttctgtcatccaccaagtatctaacaccgttaaaccgtatacttttttcgcccattttataacttcaggatttaaaggctcacctactgatagaatcgaacgtaacgatgacaagtcatatttctcaacaatatcgtcaccagcactcattaacattcttaaagctgttggtgccgtataccaaatcgtcactttaaaatcttcaatcatactataccactgttctggcgaaaagcgaccaccagctatacaatttgtagcgccatttaaccatggtgcaaaaataccataagatgttcctgtaacccaacctggatctgctgtacaccaataaacatcatcttcttgtaaatctaatacatattttccagaaatatagtgcactaacattgcttgttgaacatgcaatacacctttaggttgcccagtagaacctgatgtataatgtaaaatcaaaccatcatccgactttaaccattcaatgtcaaattcatcgctagcagtttccatcaaactaatgaagtctatgtaattgtcttctacatcctcatctacgacaacaatttttttcaagtttggtaatttatctacaggtactcgaggtaacaatgccttattagtaattaacactttagcttcactgttctctaatctatccgcaactgccttttccataaatgcttcaaataacggcccaacaattgcaccaatttttaaaacacctaacaacgcaaaatatagttcaggtgtacgcgacataaatataaatactctgtcacctttgtcaacttctgcatgttcagacaaaacattcgctgctttattagataaccgttgcatatctttataagtatacgattcttttctgtgctcatctttgtaatttaacgctattttatcccctaatccttgatctacatggcgatctatgcattcatatgccatgttcatttttccagtttcactccaagaaaatgcttgttctacgtctttccaatcaaaagtattatatgtttcttcataatctttaaggttatgtttaccttgcgctcctttataaacttcgactttcatttgaaactctccctttgttatgtgaaaacgctttctttctcaatattatacataacatttctaattattcaaaatttttacttttatcctttttctagtattaattattgtaaattttctatataatgaatttaatacaatcacgacgtcgattgaggagttgaaaatatgaatcatttaaagacgtatcaatccgaagattattacattcatgacaagcaatttgttattgaaggtcctttaacacacgaagatttgaaagcgcttactttcgatgcgcatttaaccgcatttagagatgctgaagatcagtataaagctttgttagaaattacaacattaccagaaggtagaatttatgttgctcgccaagatcaactcattgtgggttatgtcactttccactatcctgatgaaattgagcgctggtctacaggtaagcttccatatttaatcgaattgggggcaattgaagtcagcatcaattttaggcaattacaacttgcagaaaagctgatacaacttagcctttctacaccagaattcgagaattatatcgttataactacagaatattactggcattgggatttaaaaaattcaaagttagatgtatttgactataaaaaattaatgcagcggttaatggcaactggtggacttgaaatattcgctacagatgatccagaaataacaagtcatccagctaattgtttaatggcaagaattggcaaaaacattacattagaacagcaacaagcgtttgatgatattcgttatatgaatcggtttttcttttaatttttggaatatcggagggattatatgcaacaacattcatcaaaaactgcatatgtttattcagataagttattacaatatcgatttcatgaccaacatcccttcaatcaaatgcgtttaaaattaacaacagagctacttttgaatgcaaatttattgtctccagaacaaatagtacaacctagaattgcaacagatgacgaattaatgttaattcataaatatgattacgtcgaagctattaagcatgcttcacatggcattatcagtgaagatgaggctaagaaatatggattaaatgatgaagagaatggtcaatttaagcatatgcaccgccatagtgccacaattgttggaggcgctttaactttagcagatcttattatgtcaggcaaagtattaaatggttgtcacttaggtggtggtttgcatcacgctcaacctggtcgagcaagtggtttttgtatatacaatgatattgcaattaccgcacaatacttagctaaagaatacaatcaacgcgttttaatcatagataccgatgcacatcatggagatggtacacaatggagtttctatgccgataaccaggttactacttattctatccatgaaaccggaaaatttcttttcccaggctctggtcactatactgagcgcggtgaagatatcggctatggacacactgtaaatgtcccacttgaaccgtatacagaagatgcatcatttttggagtgttttaaattaacagttgagcctgtcgtaaagagttttaaacctgatattattctaagcgtaaatggtgtcgatatacattatcgtgatccactaactcatctaaattgtacgttacattcattatatgaaattccatattttgtaaaatatttagctgattcttatacgaatggaaaggtaattatgtttggtggcggaggctacaatatttggagagtcgtaccacgtgcatggagtcatgtattcttaagtttaattgatcaaccaattcaaagtggttatttaccgttagaatggattaataaatggaaacattattcatctgaattattacctaaaagatgggaagatcgtttaaatgattatacctatgtcccccgcacaaaagaaattagtgaaaaaaataaaaaattagctttacatatagcgagttggtacgaatctactcgtcaataagtaacctaatctgcaacgattttaaaagataaataaaaggcattcttccaacacccatataatttgggtcgttagatgaatgcctaattttgtgaatttattttgtagttcctcggtattcaattctgtgaggtaaaactacatttggttcttctatcttttcatcgttcatatattttgttaataagcgcatccctactgcaccgatatcatataatggttgaataacactagaaagttgtggtctaaccatctcaactaatcgtgtattattgaaactaataatttgtaattcctctggaactttaataccagcatccattgcactatgcataataccaattgcttcttcgtcgctgatacataaaatggcatctggcaaattgcctttcattttggcaaaagcttttacgccttctttataactttcagcaccagaacaattcaatgtatcacctaattgaaggccatttttatttaacacttcagttaaaccttctaaaacatcttcttgagcttttttagaatgttctccacctactaaagcaaatgatttagcgcctttttcaattaattctcccgtaatttctttcgcagcttcagtaaaatcaatattaactgatgctatatgtgcatccttaccatttgttcctgatactactacaggtacagatgattgatttatcaattctttcatttcttcagtaattgtaccaccaaggaaaataataccatcaacctgtttacttaataagttattaaaaatttctttttccttttcaggatcgttatctgaatttgaaataattgagtgatatttatacattgttgcaatatcttcaagtccacgagcaagttgtgaataatagatattagatatatctggaatgatcacacctactgttgttgtctttttactagctaaacctctagcaacagcatttggacgataattcaaacgcttaatgacttcgttaactttatttttagtttctgctttaacattttggttcccattaacaacacgcgacactgtggccatagagacacgcgcttctcttgctacatcatatatagtaactgtcataatttcctccttgtaaacgttttattcattataataacatgttttcatttcattttcatagtttaccatattttaatttacagtaacatatttttgtttggaaaaatttagcgaaaagcttgaaataaaaacaaacgctaaatgataacgaacgatatattttaattttatataaacttttttcatttttaattgtaatgttttgagaaagccttttcaaatatcaattgcatttgttgaaaaatgttcacatttcagcaacaaatgtgtgaatctattatattttacagataattcatagttataattttaattactgctatcagtcataatctttaataattgtgaaattgaacaagtgtcgaagtattataacaatcgttaagtgcagtatacctttatttctatacaaaaaataatagccactctaaaagtaatatactcttagaatggctgtaagtttaaaattgtcgattcaaagataatattctacttcaacatgacatattagttaagtagtctatagtttccttggaatattattttaactttttagcgttatataaatcagctaaaggctttaattcatcataaaatgcttggaattcatctaaatccatttgttgacccgcatcactaagtgcaacagatggatctggatgcacctcagccataactccatcagcaccaactgctaatgctgctttcgcagttggtaacatgatatctttacgacctgtactatgcgtaacatctaccatgactggtaagtgtgtaccttgttttaaaattggtactgctgaaatatctaaagtgttacgtgtcgccttttcataagttcggattccacgttcacataaaataatgttttgattaccttgtgaagcaatgtattcagctgcataaacaaactcttcgattgtagcagataaaccacgttttaatagaataggctttttcgtacggccagcttcttttaataactcgaagttttgcatattacgtgcaccaatttggaatacgtctaaatactcatcagccacttcaaaatcatttggatttacgatttcgctgacaacatttaaatcatatttatctttaatctgtttaagtattttaagtccttcaacacctaggccttggaaatcatatggtgatgtacgtggtttaaatgcaccgccacgaataaatttttcacctttagcatgtaagtttttagcaacagcttcaacttgttcaaatgattcaactgaacatggcccaaatacaaatgatttattgccgtctccaataatgcccccattatcaaatgttacaatcgtatcttcaggtttcaacttacgtgatacatataaatgtttttcattttcagatttttgtaaatctgtagaggctttgaaaatttctttaaataattgcttaatagtattatcgttgaatggtcctttgttactatcgattaagtcgttaagcatttctttttcacgttgtggatcataaatacgtgtaccttgttttaatttttcttccccaattttttgtgctagttcaccacgtttagataataagtctaaaatttgatgattcagtgatacaatctcacttctgtatgattctaatttattactcatccttactcacctctactaattatttcaagtatattccactttaaagcaataaaatataatgttaaaaaatattctaacaatatcatatgtatagttcaaccctaaattgacagaaaataatcaattttctaattatatgattcgagactgacatttcgattttctcagtcattattggaaagttatattctatattgatatttattagcaaatgttaatcaattaaataagtgtcattattatagcttattttgagtcaacattactgcttttaagaaaaattttcgtttctatcttctattataaatctaaaattctcatacattcaacctaacgcttaataaaaattaacaacctttgtctttgtatattaatataaatctatagtgaacatcactcaccaacacattcagctatatttaaattagtgaacgtcattgtaccttctaaaattcattgtttatttgattatcgaatatttttccatcttcagcttaaaatgtgcaatatcactattgttatctaacgatgtttcaaacaacataaatacatgaaatgatcgcattgcctttcaaaataaactgatgatatcaaaaaaggtaagcacctgaatgcctaccttttattttgaaattcaatttttaaaaatatattacatagcttactgctatgattgattattcaacgattttagtaatcttagtcattgaatgtacgtttctctattttacttttagctttctcaactttagcatttggcgtttttgatgcattggatgatttagcatttgttgtttttgaattcttattactagtttgattattcttttgagttgacttacttgaactactttgtttctttgcaccttgtgatgatttcttattatgttgctttttctgacctgaagttttatttgtagatgcttttgatgcatttcgtttatttgaaggtgttgtttttttagattgtttacctgatttcttgtcaacagctgtattattagttgttttttcatcagctttacgtgtaataacaccattttcaaatttagcttctttttgtttaacagtgtctttattatctatattaaccgtctctgtctctgatacatcattctttttagtaactaattgaggaatttctttcaagtcatttttagcaactggtttttctgcaaataacgcttcagttaattgactctcttttgaacctggtgttaatttagcttgcttctgttttgcagcgtttgctaatctttcagcttgtgactctggttttgatacttctacctttgctgcacttgcatctttagttaatgtgtcactgtctttctctgcttgtgcttcttttttagcttcttgaacctcttgtgcctcttgtgatatatcacttaaattatttgcacttgcttcttcttttatcgctgcttgttgtgctttcaatgccactgcttttggttcttcatttgatacagctgcacttttatctgtttctgcttgtgcttcttttttagcttcttgaatctcttgtgcctcttgtgatgtatcactcaaattatttgcacttgcttcttcttttatcgctgcttgttgtgctttcaatgccactgcttttgattctttatttgatacagccacacttttatccgcttctgcttgtgcttctcttttagcttcttgaatctcttgtgcttcttgtgatgtatcacttaaattatttgcacttgcttcttcttttatcgctgcttgttgtgcctttaatgccgcttgctcatttttagatttgtttaaaaatccttcaacacgttcttttgtataggcaaccgtttcttcaagttgcgtttttctttcttcaaacttttgcgacagttcttgttctttgacttttaaatcatctgctttttgataaactttatttttaaaatacaaacctaaagctgaaccaacaagcgcgccagttataaaactaacaacaaaatctttacggtttggtagtggttcattttgataagtgtgtttattttttaatgttcttttatcattttgttgctgcgtcatttgtatatcctcctataacaaatgcacttaaataagtaacaacctcatttaagtgcatttgtttaattattaattatttatctactctagaagtatagctatgatttgcatcagttgctacattattagctttgtaatttgcacttccacgacggtagtgtctattttgccatttgtctgcaatttccattgcaacatttgaccattgaacaacttgtgagattttatcttcattttgagaaatattatgtgtaattgaatttgttacacgatctacagagctgtttaacgtttgtactgagtcaccgatacctttaacagcatctacaactgagtttaaacgatctactttaccttggatatcctcagttaaacggtttactttatgaagtaaatctgttgtttcacgagtaataccttgaacttgaccttctacaccgtcaagtgtttttgcaacataatctaagtttttcttaacagaatttaatacagctacgataccgatacataaaattaagaatgcaatcgcagcgataattccagcaattggtaaaatccaatccattaaaaacgcctcctaattaacatgtaataatgtcattaataataaatacccatactactctattataaacatattaaaacgcatttttcatgcctaatttatctaaatatgcattttgtaatttttgaatatcacctgcacccataaataaaataacagcattatcaaattgttctaatacattaatagaatcttcattaattaacgatgcaccttcaattttatcaattaaatcttgtatcgttaatgcgccagtattttctctaattgatccaaaaatttcacataagaatacacgatctgctttacttaaactttctgcaaattcatttaaaaatgcctgtgttctagagaaagtgtgtggttgaaatactgcaacaacttctttatgtggatatttctttcgtgctgtttcaattgtagcactaatttctcttggatggtgtgcataatcatctacaataacttgatttgcaattgtagtttcattgaaacgacgtttaacaccaccaaacgtttctaatgcttctttaatatttgtaacatctagcttctctaaataactaatcgcaattacagctaatgcatttaaaactgtatggtcaccatattgtggagacaggaagtgatcataaaactcaccatccacatacacatcaaaagcagtacctttatccgtaatttgaatattttgagcataaatgtcatccgaatctttaaatccataataataaattggaacatctgcttcaattttacgtagatgttcatcatcaccccaagcaataataccttttttaacattatgtgccatttcttggaatgcatcaaaaacatcattaatatctttaaaataatcaggatgatcgaaatcaatatttgtcataattgcgtaatcaggtttataacttaaaaagtgacgtctatattcacatgcctcaaaagcgaaataatcactttcaggcaatcccatacctgtgccatcaccaattaaaaatgaagtctttttatcaccattcataacatgtgataataaacctgttgtagaagttttaccatgtgcaccagttacagctactgaagtatattgatcaataatctgtcctaaaaaatcattataacttacaacatctaatttcaattgatgtgcacgtactatttcttcatggctactcgcgaatgcattaccttgtataactaccatatcttcttttatgttattagcatcaaatggtaatatttttatccccttatttctaagagcaacttctgtaaatacgtagttctcaatatccgatccttgaacttcatgtcctaaatcatgcatgatttgtgctaatgaactcatgccagaacctttaattccgacaaaatgatagtgtgtcattatataaaactccttactcataattattctttatttaaatctgcttccgtaacataaacatcccttggttttgaaccattagcactcgaaacataaccgagttgctctaattgatcgataattcttgctgctctattatagccaatttggaaatgtctttggattaatgatgttgaaatatgtccttcattaaccataaatgcacaaacatcatcaaataattcatcttgtgattgtgtttgtgtttttttcaacaattctttttcttcaaatagatagtccggttctctttgttgtttgataaaatcaacaacatcatcaatttcgtcatcagaaacaaatgtaccttgaactctaatcggtttattcataccgctaccaagatataacatatcgccatatcctaacaagcgttctgctccaccactgtctaatatcgttctcgaatctacacttgatgataccataaatgcaattcttgttggtatgttggctttaattaaacctgtaattacattgacagatggtctttgcgtagctactaacatatgaataccacatgctctcgctttttgagcaattctagcaatagactgttcaacttcttgcggagccatcatcattaaatcagccaactcatcaattacaatgacaatttttggcattctttcatcatatggtgcttttttgttaaatgctgttatattacgtacatggtaatgtgcaaataacttataacgtcgttccatttcttctacggcccattttaaactctgtgtagctgctttgacatctgtaattaccggtgcaactaaatgtggcaaaccattataaggagctaattcaaccatttttggatcgataagtaataatcttaattcctcaggatgatttttatatagtaaagacatcaaaatactattgatacaaactgatttccctgatccagttgcacctgcaattagtgcgtgtggcgttttagcaatatccataagtaatggttcattattaattctataccccatcgcaactgttaatttagattcagcatttttaaaacttggagattcaataatagaacgtaagttgactgtcgttggattttggttcggaacttcaataccaacacgactagttcctggaataggcgcttctatacgaatatctttcgctgccaatgccattttaatgtcatcttgtaatgccgtaattcttgaaactttaacacctttttcaactgataattcaaatcttgtaacacttggaccttcagttacatcttgtacttctgcaggtacattaaagtaaaataatgcgtcattcagttctttctttttatctgtaatccagtcctcgtccgactcaataacttgtggttcttctagtaatgaaacacttggcaatttaatatttgggcctttacgaatcatcggcttagatgtttgtacagcttgatttgttgcaacatcttgttggttcgtccgaggtctattttcattagctgtatcttcatttttatttgaaaatgatgactgtaaatctttttgttgatcatcattatcttgttgtccactagtattgtttggatgtgttgtttcttcgctttcttcagttatgtcgcttacttctgaaactgaagacgaagttgattgatcaacttgctcattttccaattgattatcatcttgactttcttcaaatatttccgtttgagttgaatcaacagaaggtttctgctctgaatattgttgtgcattttgataatcattttctgtttctgcatgaccaataagttgattgttctcaacattgtttgatgtcatattatttgttttatatgcatttgtatttgactcttgtgaatcagatcttgatgatggtgtggcttgactcgcaggcattctttcactcacagcttgcttactttgtacaggctttaattcaggcacattgacttttgaatgctttttacgatccatcatacgctttttatcagatggcgtcatgacaacattaaatggtcttttacttaaagttgaaaccttttcagtctgtttctttggatttacgttttcaatagttttctcttcgacattttgttcactttcagctgcttcgttttgcacattttctgtaatttctgcgttattcttttctatttcattcatgcttgaatcttccacaacatgattatcattcacatcattcgttttcaatgagttgacacttaagtttgtttggtcatcttttttatgacgcggtgctaattcaatttcattatcaaccgttttatcgatattatttacttgagattcagttactgcgtactcttgcgttttaggagcgtctacatgcatttcagacgcgtttctattggtattatcttcgatatttgaagtagtatcctcatctacttctgtatcatttaattcataaaattctgcatcatcgatttgacttcctgaatattcttctttattcgttgctccatcttcttctgaatcagcaattaatctggattgattttttagttcatctttatcatttacttcaacgttatgttgtagtgctgattgatgttgagacgttacattcgaaaccgtaacttcatcatctgacaattgttttgttgtcgatacttgattcaaactaacttcctcataattgtatggactttcatctacatgagtgtcattagtgtcttcattttgtattgacgcttgtttattttcatcatttgatacagtttcattctctatgccatttgtatgaagctgactagcatctgtactattatctgttaagtcactatcatcatttaatgaactatcaccaacatagcgttccgcttgtttagcatacatttcatcaattgcacgttgtattgcatcttgctcttcgtttttatgttcttcacgcttttgttgcaacgcttttttaaatcgacgcttttgaagcactttacgttctcgttcacgtctaatttcctcaacaatttgtgaagcataaatattttcaattttgatagtattatcaacttttgaataattaggcattgattttgttgttgatgatacattttcatcagatgatttagatgcagttccttgtttgacaacactatcattttgtttttcttgttctaattgtttattttgagacgtttgcgtcttagctacatatttatcatatttttgtttatctgactcaactttttctgaaggtttacttacagggatacgaccattttctaactttttaggtttcattgtgccaaaaatagctgacggtacctctgaagtcttgaaactttctttgtgataatctggagttgaatctttagcacgatgatttgtattattagaatacatattatgtgtttttggcttgtgcgtttccttctcaataccattaattgcagaaacatatgtacctggcttattcgtatggtaatgtgaatgatctttatattttatactttgctgtgatattttagaattcccacgttgttcactataattttgttcttcagttgtttgatttcttctacggcgatgtcgtttttgtgaacgagaatcgtggctttgtttgcgatagtctcgatggtattgttctttttcatctgaaatagtatctgcagattgttcaacattttcattttcataagctacgctcataggaaaacggaattttcccctcggacgactataaatatcattattttgaggcagtaatgagtcatgatcgttatctatattttgtgattcttgacgtctttttttctttctatgaatcaagtcatcatttgaatcattatcttcgccgaataatttatcaaaccagctcatattttcactaccttccttaattattcaaaaaatgcttgtccaatttcatagctgtcatttaataccataatacctttttcttcaggtgcattaggtaaattcaattctttcattgaacaaatcataccgcttgaggcaacaccacgtaattcagcatctttaattaccataccgctaggcatcactgcacctactttagcaacaacaactttctgtccagcttcaacgttaggcgcgccacatacaatttgtaatgtgtcatttccaacgtttacatttagtacacttaatttatctgcatcaggatgtttgtctttagtttcaacgtagccaactacaaatttcggtgatagatcagcatttaatttataatcaaaaccagcttctgaaatacgcttttggaatacatttacaagttcatcagttaatttaatatgacctttttcttcaattgttatatcttttgaaatttcaaaaatattataacctacaacattaccttcattagtaatttcaacaacattaccttttttattgtagtttaattcaccttcaactggttcaatttgtaaaaatgcgacatctcctacatatttaggattgtaaaataaattcattatgacaaaactccttatccaattatttctatttatctttattaaatttacgacgatttgcttctaaacgctgaatcacgtttggatctcttttttgtttattatttttacctaaaataaatatcggttcaagatgaccctgtttatatccaaaggataatgatgtaattggaactagacctttagtgaaaaattccattgttaaatgtgccatcacatcatatcctgttttattgcgtatatctgcaataattaacacatcttggtgtggcactgctacgagcatttcgccttgacattgtgcctcaatttcatttaaaaatgcagtatttagtatcctacttgcatcatacccgtcatttgagttaataaaataaaaaatattaccttttacttcatcagtcgtatatgaatttgacaattttctaacattaaacagagacatttctcttatttgttgttcagttaacttcaaatcctctaacatgctttcgtcaattagacgatatgatttccctaaatcgactgcataataaactgctgtttctgcagtatgctcatcatagataaaaggaacaccttgtttagtttttttatcaaagctagtcgctctaatgacaggcataatttgactagatgatatactctcaagggttttatctgccatttgtgcaatagcttcatcaacgtaataaacaatttcatctacaattttttcttttttatcttcatattttgcgactatagcgttaagtttaatcgtgatacctttgttattatctgttcgataaatacgcaaagtttcttcttcacgattaaatttaaaatcaacgtctaaatggcttaaacgttcctttaatttatctctcatttgaaaggtattcatatgtaacactcctaatttcgcaccttataatagtttacaataaatcaacacatagtaacagagaaaaacgagtattaccccgtttttctctagtctaaattacacgtattgagctaaaaatgcatctatctgttcaattgattttcgttcttttccaatataacttccaagcagttctccatttttatatactagaaaacttggaatacccataataccattttcaatacaaatatccataaatttatcacggtctactgatacgaagtcaaacataggatatctcgcttctaattccggtaaatctggttctatcactctacaatctggacaccagcctgcagtgaattcaaatactgtagcaccttgttttaaagattcaaattgttgttctgattcaagttgtttcatttttatgtctccttaattaatgattatatataactatttagagataatagttgttattacccgattatttatattgtaatgtttctatttgattattatctaaattacaaatggcttctgaaagtaaagatctagctgcaaaatagtctcttatatcaaatactgagtctgtactatgaatatatcgtgcacatacaccaataactgcagtcggaataccaatattagctttatgaatttctccaccatctgttccacctggtgacatatagtattgatgttcaatgtcatgtgcttctactaactttaataaatagtctctaaatacaggctttaaaatcattgtaccgtcttttatgcgaattaacgtccctttaccaagttcaccagataatggttggtttcctttaacgtcattggcaggtgaacaatcaactacaaatgcaacgtctgggtctatcatctctgcagatgctttcgcacctcgtaatccaacctcttcttgaacatttgcgccaacatacaagtctacatctaattctatatcttttaataattctagtatttcaattgccaagacacaaccataacgattatcccatgctttagcactatatcgatgttcagataactgtgtgaatggcgtgtgaggtacaattgtatctcctatatctattccgcgctcacgcacctcatcttcattttgagcacctatatctaatgttaaatctttaatttccggtgcaccttcactaccagtacgaaaatgtttaggtatattagaaacaacaccgataattttatcgccatttctatttttaattactaagcgttgtccttgccaaatatcatttgcaacaccacctaaatttgtgaattgaatcattccatttttagtgatatttgtaatcataaatccgatttcatccatatgtgctgcaatcattacacgttttgcatttggatttttagattttttcacaccaaaaaatccacccatacgattttcaataaattcatctacgtacggcgccatttgctgagtcatataattttttacttcttcttcaaaacctggtgccccatgaagctcagttaaagtttgaattcgttgtaatgttacttttttatttatgttcataaaagttctcactccttataagttattatatcatcttcaatatggtaaactaatgatatgaatttgaaatcaagggagcataaatgatgactaaactgaaatatataattccaacaataattgcagtagccattgtaattatttctaccatttcaatcatccaatttattaatcgtaaacgctataatcccgttaaagtacttaatgaagtaaaatcatattttatgaatgtcaaaggctcatatatcgtttatgaaccattcgttcatcctgaaactgataaataccgtttagtttatcaaggtggaattacaactattaaaaatggtcaaaatattcattatgatttttatgcagatgcatatactggtgaagtcattaacattgtagagcgttaatacgaattttatccatatttgatttggatcgtaaaacttaaaaatgagccacaccctaattagtaagattggatgtggctcaattttttatttttgaaaatttgtttagtaatacatctttattttagttattatcaactaatgtttcacgtaaaatatatgcatctatgttttcaccattatcgctgtattttacagcaaagtagttttcatcatgataaaacaagaaccaatattgttgctgaataaaatatggtatcatgcgttctttttcacgaatcgattgcataggataatcatcatatgccgttacccatagaggatttttatgtgcagtagttgggaatatatcacccatatgaactgctttatctccttgactttcaatcgtaataatcgtgtggccaaagctatgacctccactatgttgcatcttgatacccagaaccggttcaaaatgtttttcgaataaaatcaacttgttactataatcgcctttattcttatcccagtaagttgatttacttcttatattaggtgcaataaactcatgccactcatcttgttgcacaacatgaatcgcattttcaaaaattgcatgtcctgcttgatcagtcaaaccggcagcatgatcaaaatgcatatgtgtcattagcacataatcaatatcctttggcgttaaattataatttgccaaatcagcaattatatgactttcttcatctactccaaaattacgtaattgcttttcagataatttaccattaccaatacctgcatctataatcaaattatattgagccgtttgaatcaaaattggatgtgtcggtaaattgatttgatttcgttcatttgcattgtattgctttgaccacaacggcttcggaacaacaccaaacattgcaccgccatccatttttgtattgccaccatttagataatgaatagatatatccccgattttcataacatcacctattctttctgtattcgttattacaattagcatgtgtttattacatcatatcactattcataaatgcgaacaaaaacgaaacgccccacactaatacacttctaactacttataaagattaatgcaatcatattatatgtaaatgcatcataaccatcggcctgtatttttaaattaataattaaaatttacaagtaaaatgcaagctttattcttttaaatcaaaggtatttagtataacattgttcataggcgcattatctcctttagttatttgtttagtcacttttaattatagagataattgcgctttttttatattcaaaatcaaaaaatcggacagatgaaaagttaaaaactttttccatcagtccgatttattatagaacctttatctatagaaccattatagtacgaaaaaacacttatgattgtatgtgtacataccctcataagtgctctatttttgtgaatggaatttcgcttccatacgataaatacgtgaccctttatccgaaaatttcttttcatattctgttaaaatattactgccatcgtcttcttgatgtaaatttagatttatttttgtaaaatacattccaaattgagacatactttctaaactgtaggcaaatagtcctctgttatcagttttaaaatgtaaatctccttcatcatttaagatttgttgatacaacgctaaaaacgtatgatacgttaaacgtcgttttgcatgacgattttttggccatggatctgaaaagttcaaataaatacgcgaaacttcgccgtctttaaaatattcatttaattcaatggcgtcattacaaataatctttaaatttgttaaacccatctctttaactttatccaatactttataaacgatacttttctcacgttccattgaaatatagttaatatgaggattttgagcagctaatgttgtaataaactgccccatacccgaaccaatttcaatgtgtatcggttgcgttttatcaaaccattcagtcattttccctgcatgttgaccgtccatgtcaaccaattcaggatgatcttttaaataatcttcagcccatggtttgtatcgaactctcatattttattctcctcttaaataaacatgttactattcataacttcatttaggaatttaagccaagtgttcatatccttatatcttttttgctcttcataccattgaacaagacctatagattgaattaccgtataccatttcatacgtttatttaaattcaagctctcttgaacaccatatgtttcaagccattcagaccattgttgttgtggaacatagttgtaaagcagcattccgatatcaattgccgggtctgcaatcattgcaccttcccaatcaactaaaaatagttcatctcgatcggataataaccaattattatgattcacatcaccatgtacaacagtgaaaaaacgcgaatctaaactcggtatatgctcttctaaataggttaatgattttctcacaatatgatgtgttaaaacttctcttgataaagaggcattaattttattaagcataatctcaggagtaataggttccatttccatacgctttaacatacttaataaaggtctagaattgtgtatcttctttaataaatgtgcaactcttgtttgcttcatttcgtttgaagatagttcacgcccatttttccaatgttgtgctgtaacaacctcgcctgtttctatgcgtttcgtccatactaatttgggcacaataccttctgctgataatgccgcaataaatggatttgaatttcgttttaaaaacaacttttgtccatcttgttcagccatatatgcttcaccagatgcaccacctgctgaatcaagtgtccaccctaattgataaaactgctccaactcgtccacctcactttcaattagaaaatggctctagaaataggtttttcaagagccatatattctaatttataacaccatactggtacaaatattatgtccagataattattgtaaatcctcaaccaatgcctacattacacgactaaatttaaatcgtaatgtctgtcattgacaccatacattctatagtcacttacttgacatataatgttaccgtctctaaaactacatgtttttgaatctctgtaggcgataaactctagttttcaaaataattgctatcccattttcatggttagcataaatttatgaactgtaacatttacgtacttagtaaaatatgatgcacatcatatttgtaactcatagaaaattttataatttttatcattatatttcaactgaaaatgagaaacaaaatggcactttttactaatatgtgttttctaaacaacacttttaagcttcgttttaaattataacataattcacttacgaaagttgataaatttaagtaatttaatctaaaaatatgatgaaagaattttaaatactgtgtgactctatatacttttcaaatccttcttgtagttgacgtgtaattgggccaactttaccatcattaactggttcaccatctaatttaataacaggtgtaacctcagctgaagtacttgaaacaataacttcatctgcgtttttcaagaaatctacagtaaacgtttcttctttaaatgggatgttatagtcttcggcaatttttttaattacaattcgtgtaataccattaagaatatagttgttaatcggatgtgtataaatcacaccgtctttaattgcataagcattacttgaagatccttcagttacagtttcacctcgatgttgaattgcttcaactgcattatatttcacagcatattcttttgctaatacatttcctaataagttcaagcttttaatgtcgcaacgtaaccatcggatatcttcaacggtaacaccattcacaccattttctaaatgatcataaggacgatcataactctttgtataagcaacaattgctggttctacttcaggtgtcgggaagctatgattcctttcagctacaccacgcgttgcttgaatataaattgccccagtttcaatttgattcatatcaactaatttacgagatagttcaattaattcttctacagaataatttaaatctaaaccaatctcattggcactacgtaaaaatctttcataatgttctgttactgtaaataacttaccattatatactcgaatgtattcataaataccatcgccaaatacgtatcctctgtcgttgtatgaaacctttgcttcacttggacttacaaactcaccatttaaaaaaattttttccatatattattcctccacgcataatgaataaattgcttctaagtaaatactagttgcgttaaataactgttttttagtgatatattcatttttctgatgcattaaatcttcagaatcactaaacattgcgccaaatgctacacccttgtctaagtttctcgcataagtaccgccacctatagtataaggttcagtcatatcatttgtttgatttctatatgcagtaactaacttttgtacaaaaggatcatttttatcaacataatgtggtggttggactttacctaatttcacttcaaagccatattgttgaatctcatttgcaaaacgatccatagctttttcaaattcaaatccttctgggtagcgtaagttgataccgaaaagacctgcgttttcattatcatatgtaataacaccaatgttagttgtcacgtcacccatgaaatctgtatggaatttcattcccatcttttcaccaaaatctgaattaaataagtagcgattactaaatgctacaaacgcttgtgcattattatcaagatttaatgatgctaagaattttagtaagtaaagacccgcattcacaccgatagatggatccataccatgaaccgctttaccttcaactgttaaaactagaatgccactatcaacagtactatcaccttgtaaatgattttgttctaaaaagtactcaaagtcttgaataacatctgtcatattttctttaacaagcactcttgcttctgcatgatcaggtaccatgttgtaacgttcaccagatttaaaagttattaattcataatcaggttcatcttgatcttcagtaagtttattttgaactaaatcaaatgttgtaatgcctttttcaccatgaatacatggaaattctgcatctggtgcaaaacctaatgttggcatttcttctgttttaaaatagcgatccgtacatttccaatcagattcttcatccgtaccaataatcatatgaatacgtttcttccaatccacattcatatcttctaatatcttaattgcataataagcagcaattgttggacctttgtcatcaagtgtacctctagctatgatagcatcttctgttacaaccggctcgaacggattactatcccatccatcaccagcaggaacaacgtcaacatgacataagatacctaatacgtcatttcctttacctgcctcaattcttcctgcaatatgatccacatcatgtgttgtaaatccatctctatgtgcaatttcatacatgtagtctaatgccttacgaggacctggaccaactggtgcgtcttctgatgcttttgcatcatctctcacactttcaattgctaataatccttttaagtcattaatgatttgatcttcgtattgttgaactttttctttccacattcgaaatcgacttccttttttctataagttaaattctattttacatgaaaagatataaaaactacaataagatgtcagaaaataataaaaaggaacaaaacgatgctattgatatgacacaaatcataaatagctgctttgttccttttttaatttatatatttaaaatacacatattcaagagctcgagatataagtcaatgtactaggcacacaatttaatattgacagtaattaaccgaacgaaaatgcgccccggggccccaacatagagaatttcgaaaagaaattctacagacaatgcaagttggcggggccccaacatagaagctggccaatagttagctttcaataatgtgcaagttggggtaagggccccaacacagaagctggccaatagtcagctttcaataatgtgcaagttggggtaagggccccaacacagagaatttcgaaaagaaattctacagacaatgcaagttggcggggccccaacacagaagctggccaatagtcagctttcaataatgtgcaagttggggtaagggccccaacacagagaatttcgaaaagataaagaaatacgttttctttagatattagtatttcttatgaatgagtttcacgcatgtattcttctttctatatgcatattagctatgactaacgataaagaacctgaaacactaataaatgtcctatagtttacaatattatattggcagtagttgactgaatgaaaatacgcttgtaacaagcttttttcaattctagtcaaccttgccggggtgggacgacgaaataaattttgctaaaatatgatttctgtcccactcccttatcatttctgtcctactcacatcttattctttatcagataatgcatttttattcttttttaaatcttcttcagtgacgatacgtaaattattatttggtgctgcgccaccttcatcatcaaatttacctttttcaatactttcgtcagtcttattgtcatattcggtaaattttgatttttcttctttgaaaaatgcttttggattattttttaatctattagcatattctttcggatttgtttttacttctttaattgtttcattagcaattgttcctaattgcgtcgctttatccttagcattatctttatagctttgaggatcttgtttatatttattatattctgctttcagcttgtcacgactatctttacgtgtaacaagtacagctgctacagcgccacctatacctaaaatcgctttaaataaattaccttttgccatatcaatcgtctcccttttatttataatttaatttgtcaaaatcattttcagttaataaacgatattctcctgaatctaaattgctgtccaattctaaatcagcaattttgatacgtcttaaatgtaatacctcattttgaatgctatgaaacattcgtttaacttgatgatattttccttcataaattgttacgtgtgacgtttgattatcaatataagttaatattgcaggcttaaccttgccatcagtcagtgttacaccctctttaaaagcttgaatgtcgtcttcagtgataggatttgctgaaataacttcatattttttagaaacatgtttgtttggactcattaattcatgattaaaatcaccatcattcgttatcaataaaagcccttctgtatctttatcaagacgaccaaccggaaaaatatttagatgttggtattcaggtattaaatcaataacggtttttgaatgatgatcttcagttgctgatatataaccttttggcttatttaacataatatagacattttcaatgtattctattaattctccacgaactgttatcttatcgttttctggttctatatgtgtttttggtgatttaattacttgttcgttgacatttacaaggccttttttaagtaactgtttgacctcattacgtgtaccgacgcccatatttgctaaaaatttatctattctcatcgtaaaaacctaactctacgtcttaatttttcaggaatttcacctaagaattcgtccgcaagacgcgttttaattgtgattgtaccgtaaattagaatacctactgtaacacctaaaataataatgattaagtaaccaagtttagtaggttctaagaatagatttgcaaggaaaaatactaattctacacctagcatcataataaatgaatacaagaatatttttgcaaaatgaatccaactatagctgaatttaaacttcgcatattttttaagaatatagaaattacatccaattgcaaataataatgcgatactagtacttaaaattgcaccaggtgtatggaataacataattaatggatagtttaacgctaacttgataactacagaagctaaaataacataaactgttaatttctgtttatctataccttgtaacattgatgccgttacacttaatagtgaaattagtattgctacaggcgcataatagaataataagcgactaccatcatggttagggtcatgacctaaaacaattggatcgtaaccatagaaaactgtgaataatggttgtgccaaggccataattccaatactagctggaacagttataaacattaatacaccaatagatgttctaatttgatgatgcatttcatgtaagcgaccttctgcaaatgtttttgtaatataaggaattaaactcactgcaaaaccagcacttaatgatgtcggaatcattacaattttattagttgacatatttagcatattaaagaatatatcttgtaactgtgaaggtataccaactaaagataaagcaccgttatgtgtaaattgatctactaagttaaataatggataattcaaacttacaataacgaacggtatactataagcaataatttctttatacatcttgccatatgacacatctatatctgtgtaatcagattcgaccatacgatcaatattatgcttacgctttctccagtaataccagagtgtgaatataccaataatcgcaccaactgctgctgcaaaagtagcaataccattggctaataaaatagagccatcaaagacatttagtactaaataacttccgattaatatgaaaatcacgcgtgcaatttgctcagttacttctgacactgctgttggccccatagatttataaccttggaatatccctctccatgtcgctaatacaggaataaagataacaaccatactaatgattcttataatccaagtaatatcatcgactgaccaaccgtttttatcatgaatgtttctagctaatgttaattcagaaatataaggtgctaagaaatacagtaccaagaaacctaaaacaccggtaatactcattacaataaaactcgatttataaaatttctgacttactttatatgccccaatagcattatatttcgcaacatatttcgaagctgctaatggtacacctgctgtcgcaactgcaattgcaatattatatggtgcataagcgtatgtgaacggcgccatattttcttgtccaccaattaaatagttgaatggaatgataaaaagtacgcccaataccttggtaattaatatactaatggtaattaaaaaggttccacgcaccatttctttactttcactcattacgaatctccctatctcatgtttattaaagttttgtaaactaaaagctgtttctctgtaaaatcatttttcattattatgaatatatcacaaaactttatttcattgtcgtatattcaatgaattatcataacaaaattatcaacacattgtcattgaatactagattttgattagaatattacgaaatttcatataaacattatactactatttgagatgaacatcgcataacagtagaaaaatcattcttatcatacacatacatcttcattttttatgaagttcacattataaatatattcaacataattgtcatctcataacacaagagatatagcaaagtttaaaaaagtactataaaatagcaattgaatgtccagtaacaaatttggaggaagcgtatatgtatcaaacaattattatcggaggcggacctagcggcttaatggcggcagtagctgcaagcgaacaaagtagcagtgtgttactcattgaaaaaaagaaaggtctaggtcgtaaactcaaaatatctggtggcggtagatgtaacgtaactaatcgattaccatatgctgaaattattaagaacattcctggaaatgggaaatttttatatagtcccttttcaatttttgataatgaatccatcatagatttttttgagtctaggggtgttaaattaaaagaagaagatcacgggcgtatgtttccagtttccaacaaagcacaagacgtggttgatacattagtgacaactatcgaacgccaacatgtaacgattaaagaagaagaagctgttagtagaatcgaagttaatacagaccaaactttcactgtacatactcaaaataatagttatgaaagccattcgctagtgattgctacaggtggtacaagtgtccctcaaactggttcaactggtgatggttataagttcgcacaagatttaggtcataccattactgagttattcccgaccgaagttccaattacatcagctgaacctttcatcaaatccaatcgtctaaaaggtttaagtttaaaagatgttgaattgtcagtacttaagaaaaatggtaaaaaacgcatcagtcatcaaatggatatgttatttactcattttggtatcagtggtccagctgcattaagatgtagtcagtttgtttataaagaacaaaaaaatcaaaagacacagcacatttctatggcaatcgatgcatttcctgaattaaaccatgaacaattaaaacaacacatcacatcattattatcggacacaccagataaaatcattaaaaacagtttgcatggtctaattgaagagcgctacttactgttcatgctggaacaagcaggaatcgatgaaaataccacatcacatcacttatcaaatcaacaattgaacgacttagtaaatatgtttaaagggtttgtatttaaggtgaacgggacattacctatagataaggcatttgtcacaggtggtggtgtgtcacttaaagaaattcaacctaaaacaatgatgtctaaattagttccgggattatttttatgtggtgaagtattagatatacatggttatactggtggttataatattacaagtgcactcgtaacaggacatgtcgctggattatatgccggacattactcacatgcatcaatggaataatagtataaaatttggttcgattctctttagtagatcaactttttcattcaaataaaaatgaccttaatataactgagtcactaaaaagtgtcgttatattaaggtcatttcgttaattatgattctttttcgtttttagtacgtcttctagctaacaaagccgcacctgtaatcagtgcaaattctttcaatggtaaatccattccttcagaacctgtatttggaagttctttttcaactttgcgcgattcatgtgtctcttcttttttaataggcgtacaaacttttggagctggctgaatttcttttggtgatactttcgtcgcttcagctggtaatttaattgctaaaatttcatcaacaatgaattgcgtgtgttgtttgatgtcatttaatgtcgcatcttcatcaatcattctattgccatctgcaacatattgatcaattaatacttttactttagctaattgttctggtgttgcgatcgctttgaatttcgcatatgtttgttgagcaatgttatcaattcgcagtaagctattttctttttcagtaattactgcttctatatcgcttaatgcaacattaaatcgttttaaaactgcatcaacatcagcattagtgcgtgctgtttttaattcttcatccatttgtaattttaaagcagttatagcttttaatgcatcagccttattacgattacttacttttcgataattttgcactaaagcagtgacgcgtgcaagatcatcattaatcgttttttcagcatctggctttttaataggatgtacatctaaatcatgtattgtttgtagatttaatgatgctgttttatcaacttgtgcattgctacgatcttgatcaatttgtccaatagcagtgtcataaatattttgtaactgtgctaatatactatttctttcttctaccgttgcttgaatattcgcttcaattgcttgttttttatcgttgaataatgttgtcaattgttctcgagcagacgcctttctgttaataacaggttcgatttcacgaatttcgtttttctcatcatgcaataaatatgccacatctgcattagtcactgcactagcaatttgttgtttagctttaattaactctttttcaacttgtgctattgcaatattttgttcttcatctgtcgcttcgttatttgctttaattaaattaattttatttgtagcgatattttgaatttgttgtaatgctgttgctttaactgttgtcgctggtttaatttttgaaataatattttgagcatttatactatcttgattaacttgggcagtcttatctgcatgattgatctgatcaatagcctgattaagtgcttgttctactaaatgtttagcagctagtctttcttcttcagttgataaatcgctttgatcgattagtgcattttgagcttcggcttttacaccaacagattgacgcgctgctggtttaacttgaactttaggtaaaatcactttgatgttgtcgttgccatcagtctcagttcgatccacttctgcattcgttttgttttgtgcaatgtcatttttaattgtatttacaattttatttaaagtatcaatagcaacatctctttcatcttgagtagtatccaacgtatttcggattgcatcgagttgatttttattattttcttcaatgctatcaagcgcagctcgtttacgtcttactttaggttttatttgctctattgccttgattgtttgatttctaacatcagtaacagcagcatcttgatttgtattttctatttcttgttgcgcttgtttgagtgtgtcgctaattaattgattcgcttcatctaattcatcaactgttgcatgtggtgtatcttttattgattctacttgattttctgcacttgcttttattgcttgttgtgcttcaggcttaattacaatatgaggttgtacaccttttagtgtagcaatgccatttgtttcaacacgtttcacatcattattcgctattgcttgatcgatgttttgtaatgcacgtttttcattattcgctaattgatttaaagcaacttgtttttcttcatcagtcgcatgttccgcttgctcaatttcgcgctttttagcttcatattgttgcttaactgcatctctagcagctgctctaacaatatggtcaggcgtcactaaagcaatgctatcaagcgcttgacttgttgtatcatcaacttgttgatttgttctattattcgtaatatctgtcatggcttgatttacaaattcattgattttatctagtgctacttgtctttcttctgctgttgcttctttatcctgattaatcttagcacgtaattcattcgctttttgattgattttttcacgtgcagctggtttaacttttgtttcaggttgaataattttaatcgctgatacaccatttgttgctgcttgattcacctgactattcgtttgagcttgctcaatagctgcaagtgctttttctttttctttagctaatgcttgtgaagcaacttctttctcattatctgttgaatcaagactattatcaatttgctgttgcttttctttaacagctttttcaatatctgcaattgcctttggtttaattactacttcagcttcaacattatctatagcatttaccgcttgatttgtagttgtgtctacctgatcatttgtttggttttgattaatttgattaattgcttgatctttaagttgattgatttgattaacagcagcctgcttttcttcgtcagttgcattaggtgtttgtttaaccgcttcaatacgcttcgccacttcagcagtgattttatctcgcgctgcttgtttttttactacatcaacttgaacagcatcgatattattctctgctactgtcgcagcttggtctacttctgcatttgtgttagcttgtttaatactttcaatagcttgttgtctgtcttgatttaaagtattgatcgcagcatttttctcatcattcgttgcatctggtgtagcattgatttcagctaatttagcattataatgctgattgatttgtgctaatgctgcaggttttttaacaatatttggctgaatcgcattaattgcttttgtacctaattgttgcgcttgatctacttccgcatttgtatcagcttgatttatattattaattgccgttgctaactcttgatccacttgatttaaagccacttgcttttcttcagttgttgcatttgtgttttgattaatttcttgctttttagcagttgctaaatcatttaatacacctgtagcagtttgtttcttcgttacatgcggttgaactgcgccgatttgattgactgcatcgtctctaatactattgaccatcgcagtagtagacgtcacaccaatatcagttaatgctctatttttaagtgtattgacacgatttatcgcttcttgtttctcttctcgagtcgcgtcagttgtagcattgatatttgttatcgcctctcgcgctttatcatttacaacattgcgagtatccgttttaacttgtgttgccggttgaatcactactatattttgtgtgccctgatcttttgcttgtgcaacttcttgattcgtatctgctgcattaatattttgcttcgctgtggctacagcttgatcaagtaattgttgtgctgcttgttgttcttcgagcgtcgcatcattattattaaatatcgtattatgttgcgtttccgcacttttatcgatggcattttttgcatctgtttttacttttgtagctggtgtaattgcttgtattccttgaatcgcatttgtctttacttgttcaacatcagcattggtattagcgtttaaaatgtttgtgtttgctgcagttacagcagcattcactttgtcaattgctgcttgtctttcttcttgagtcgcatcaggattagcattgatctctgcgatatgttgttgtgcatcatgtgatacggcatcccttgcagcttgcttaacaacagttacaggagcaattggattaatggcatttagaccatctcctttggcgttatcaacatcagcatttgttgttgcttgattgatttgttctaaagcatggttggttgcttgagttaattcgttcaatgctgcatttttctcttcctgagttgcttctctattactatttatttgttgtcttttcgttgctgttgcttggttaattgcatctcttgcagcttttttatgagttacttgaggaacaactgctccaatagtattgatgccattatttttagctgtttcaacgtcagcatttgtagtagcattcgtaacattatcaatagcatctgtttcatccgtagctaattgatttagtgcatcttgaatctcgtcttcagtaacatctggtgttgcattgataatttccctttgtttcgttgctttatcacgtattgcttttttagcatttggtttaacaaccggtgttgcagtatccccacttaaggtctgtataccttgatctttgattctagtaacgccatcatcagtcgtttggtcaccaatattaccaattatttcatttttatgttcctcgataacttgtattgctgcttgtttttcttcatctgtcaattcatcattttgattaactaaatcttccatttggtcaacttttttattaactgcattttcagcatcaacacttcgaattaacgtatgttgcatttgattagttaatgaatcaatatatgcttgagaaactcttttatttaatggtacattgttacgattttcatctaaaatcgtttgtgcgcgtcgtttcagaccattaaagatatctaatgacgcaaatgtataatcagcttgttgaatacgtctgtcaacttcggcttgtaatgcatctttattcatgatgatatcgatagtatatggatttgtacttacagtatgactttctgcagctgaattaatgaaatcttgtgtatatgttttatacgttaatgtctcgttaaatgttactgttcttggtgtcggcacattatttacacgtaatttatatcttaaatcgagtattttatcaggcataagtcgtgccggagagtttgctgtacctcctccagtacttttaattgttatcacacgatttgctgcatcatatgtaacattcatatcattaacatcaacgcctgaattgttacttggaaaatctttagtcaatgaattgttcacatattcaacaccttcaggtaattgaacttgatatacaaagtcatttgtatctagagaagcaccagaattaccattattctttaatgatgttgttacagtaaactctttattatttgttgctgttggatccattgttcgtctttcaacaaaaacatgtgacccagaatgaagtccgatagagtcaacaaagctatagtatttgtaaccatcttttagttgataaatgccacgcgcatctgttattgcgtcatttttaggtacaaattgaattttgagatttctcacattatcaggtactttaaataaacgcaaagttggaccgccttcaacagtcttttcagcaatcgtatcattagtatcagcatttttgataataacatttgttgcgccttgaccgtttttagtagtcattgtattaaattcaaagattaattcagaattcggatttactgttaatgctttctcgataccattaaaatcgccatggtcattcgtatcagttccatgtatacgacctaatgcaattacatttccttgtgcttgatagttcttattatctcctgaatcaaacatgctcgttcttaccattgcatgactaaacacccctactttgccaccattgattagtgtgaagcccggcaagttattaacaacgtttactgttggcacagaacggttggtacttggtctaataccattgtcatcaaatgacagcacttcgttaggtgcattttgtcctgcattattggcattaggatcagttgttggcgtatatggcgctgtaattgcaactggtgcaccaccgtttcctaccgctgcagccgctggatctgctggagttgcattaggatctgccggtgccgcacgtctacttctctttttcggtctattagatgctggttcagcaattgcaactagctctggtttatttgaagaatgacgaacatcttcttgaatttcctttaaagttagatgtcctcctgaaccattttcatttgttttagttggtacatttaatgcggtattattcgacactacatcattattattagcgtttgacactgtctcagttgctgttgtattgccatctgtatgattattgttttgtgctgaaggcgtacttgattgcactgatgttggcgtagcttgatttactatactaccattattatgattaaccaatgcttgattcgttgcttgattggttgttgcagattgattaggtgtattctgcgcactatttgctaaacctctattattagcaacatctttatcttgtgaatttacaggtgttgcttgattagtatcgctttgtacattattatccgtagttaaggcttgtgcaccatttgggtttgaaagtaataaaactgttccgattaaagtagagaatatgcctactttatacttcctaatactatatttatttttctttaacaaattcatttcattttcctcctggttgtctgttctctgctgtgttgttaagaattatgctaaaaatatacgctccctcatattatatttatagctatattattttgtgcaatattttaagttcactcaattttatcatcatcattttataaaataaagttttattttattacaatttagtttccgttttgtaattaaaatcttaataaaacataacaagaacgctttagattgttttgtaacagaaagtaattcataccaaaaaacaccaagcaaccgaaacgttacttggtgtcattacaaatgtaatattattttaaattatgtcactactttaaatactttttatttccaaaccttcatcgccccatgcgtgcatgccgccttcgacatttacggcatcaatgccatttgcctctaaatattctacaactttagcgcttcgaactccaccagcacatacaatataatatatttcatttttattaaatgaatttaaattatccggaatggtatccattggaattaactttgcattaggaatatatcccattgctgtttcttcatcagtacgaacatcaacaatttgaactggtttagattctaaaagtttattttttaattcatctgtagtaattgacttcatttcaaagtcctccttaaaacattatttagctacaatattgactaatttttgaggaacagcgatgactttcatgatgtctttaccttcaatactcgctttaacattgtcattagataaggcaatttcttgcatttcttcttttgatgtatctttagcaattttaattttagctctcaatttaccattcacttgaacaacgatttctacttcatcatctacaagtagtgcttcgtcataagttggccaaggttggtacgtaatagactcttcatgtcctaattttgaccataattcttcaccgatatgtggtgcaataggtgctaacattttaacgaagccttcaatgtaaggtttataaacttcatcaactttataacactcattaataaataccattaattgactaatagcagtattaaatcctaatgtttcaaagtcttctgttacctttttaacagtttggttataaactttatctaaagatttattatttgtagttacaatttttgaactcaatgtcccatcttcatttaccattaaacgccatacgcgatctaagaatcgacgagacccatctaatcctttttcactccatgcaattgcagcatctaaaggtcccataaacatttcgtaaagacgcaaagtatctgcaccatgagactgtactatatcatcaggattgattacatttcctttagatttactcatcttctcattaccttctcctaaaatcataccttggttaaataatttttggaaaggttctttagtaggtacgatagccaaatcataaaggactttatgccaaaatcttgcatataataagtgaagaaccgcatgttctactccaccgatatataaatcaacaggtaaccaatgttttaatttttcaggatctgctaacatattttcatttttaggatcgatgtaacgtaaataataccaacaactacctgcccattgtggcattgtatttgtttcacgacgtcctttcatacctgttttttcatctacaacatttacaaatgaatcaatattagctagtggagactcaccagtccctgatggcttgatttcatctgtttcaggtaacaacaatggtagctcttcttcaggaacagttgtcattgttccatcttcccaatgaatgacaggaattggttcgccccaataacgctgacgactgaataaccaatctcttaatttgtaattaactttcttttcgccagcacctttttgctctaataattgaatagctttagtaattgccgcttcattttctaaaccatcaagttcaccagaattaatatgtttaccttcaccagtgtatgctgcttcttcaacatttccaccttcgatgacttcaatgattggcaaatcaaactttttagcaaattcataatctctgtcatcatgcgctggtactgccataattgctccagtaccatatgttgataatacataatcagcaatccaaatttgtactttttcaccagataaaggattagttgcatatgcaccagtaaatacacctgatttatcttttgctaaatctgtacgttctaaatctgactttttagaagcttctgtttgataagcttttactttttctttatattcatctgttgtaattgaattaactaatgcatgttcaggacttaagactaagaatgatgcaccatagattgtatctggtctagtcgtaaatacttctacttttccttccgtattatctacatcaaatgaaactttggccccttcagaacgtccaatccaattgcgctgcatatcttttaaagactcaggccaatctaaatcatctaaatctgctaataattgatctgcatattctgtgattttaagtacccattgtttcatcggcttacgataaactggatgtccaccacgttcagagacaccatcaatcacttcttcgttagataaaacagtgcctaatgctggacaccagttaactgcaacttcatcaacgtatgctaaacctttgttatataactgtatgaaaatccactgtgtccatttatagtattctggatctgttgtattaacttcacgatcccaatcataactgaaccctaattctttaatttgtcgtttaaaagtttggatatttttctttgtaaattcacgtgggtcgttgccagtgtctaaagcatattgctctgctggtaatccgaatgcatcccaccccatcggatgtaatacattatatccttgcattcttttatatcttgaaatgatatctgttgctgtatagccctcaggatgtccaacatgtaaaccagcacctgatggatatggaaacatgtctaaagcataaaatttcttttgacctaagttatcatttgttttaaatgttttattttcgtcccaatagtcttgccatttcttttcaatttgattgtggttgtaattcaacacatttcctcctattcaataaaaaagacacctctaactattctatttacatagggacgacatttgccgcgttaccaccctatttcacaaaaattgtgcactcattttaatagtaagagatgtcattcattcaatttaaaattaatacgatttacatttagtccttaacactagctctcagcatcactagctttctgtagaaaagctccaaacgaaattaaattatacaaattaatattatgttataacgacatttatttcaagtctataacgttaattctatttactcattatgcatctattttttaggttgcgtattattctccttgaaaaccattaataatattaatgcaaatacaagtagtagcatcataccgataaacatcatgcgcatattaaacgcatcaactaatacaccaccaagaaatggaccaaatgcttttcctactgtagcagctgaattcacaaaaccttggtactgtccttgcttaccatctggcgctaactgattggctatagttggaactgctggccatacaaacatttctccaaaagttaaaataatcataccgacaacaaatattgtaaagttttcggcaaaactcgtgacaaagaacgacaacataaaaatgatgatgccgacaaacatttgcttctttaagtttccttttaacagatagagaatcggtttaattaatggttgtgctactaaaatcattattccgttaattgtccataaaacactatattgtgccattgaaatattaatagattgtgtaaatgaagcgattgtagactcccattgaatatatgcaacccaacaaattgcaaacattgcacaaattagtactaatgaaataaatcttgctttattctttttaccagtaatatctaaatgagttggatatttaactttcgcattaatttcaatattaaattgcgttaccgcgacaagcgcaaacacaacatacataataagattggctaaaaagatatagttaaagctaaattctgcgacaaagccgcccattgcagcaccgacagccacaccaatattttgcgctaagtatatcgcattaaacgtttgtcttccgccatttggccacactgctccagccatagcgtatatcgcaggaataatcattccgccaccaaaccctaacattacaagccatacagcataccaaggccacccgtgaaagaaattaagtagcgttgtactacaaagacaagtgaaagttccaattaaaatcgtcttgtatccacctaatttatcaaatagtgaaccacctaataagtttccaataaccatgccaaatgaatttatcattagcactaaaccagcaacagttaaactttttccaagttcttgtttcatataaattgtatttaaaggccacaaaaaactggaaccagtaatatttaacgccatgccaattactagccaccagactgatttaggtatattcatatttcatagttcctctctcttttttgtcaaactataataaacactataacattaaaatatgttaaaatctgtacttagaactctttttttatagaaaggaaaatgacatatgggcaatcatttccaatacgcttttgaaaacaaacgttatcacacatggaattaccatttaaaaaataaatttggacaaaaaatatttaaagttgcattggatggcgggtttgactgtcctaaccgcgatggcactgtagcacatggtggatgtacattttgttctgctgcaggtagcggagactttgcaggtaatcgtgcagattcaatcgcagtacaatttaaagaaattaaagaaaagatgcatgagaaatggcacgaaggaaaatatattgcttattttcaggcatttacaaatacacatgcaccggttgaagtattaaaagaaaaattcgaacctgtacttaaagaaccgggtgttgtgggattatctattggtacgcgtcctgactgtctaccagacgatgttgtcgaatatttagcagatttgaatcaacgaacatacttatgggttgaattaggactacaaacaatccatcagtcaacatctgatttaatcaatcgtgcccatgatatgaaaacttattatgatggtgtggcaaaattacgtaagcataatatcaatgtatgtacacacatcattaatggcttacctggcgaagactatgacatgatgatggctactgccaaagaagttgcacaaatggatgtacaaggtattaaaattcatttacttcatttgttaaaaggtacaccgatggtaaaacaatacgataaaggtttattaacttttatgactcaagaagagtacacaaacctagttgtggaccaattagaagtgattccccctgaaatgatcgttcaccgaattaccggtgatggtccaatagatatcatggtaggtccaatgtggagtgttaataaatgggaagtattaaatggcatcgatgctgaattagcacgtagaaattcttatcaaggcttgcgttacaagtctaaggtgaagcaatgaaattagaacgtatactccctttttcaaaaacacttattaaacaacatataacaccagaaagtattgttgtagacgcaacttgcggtaacggcaatgacactttatttttagccgaacaagtaccagaaggacatgtttatggtttcgacattcaagatttagctttggaaaatacacgtgataaagttaaggatttcaatcatgtttctttaataaaagatggacatgaaaatattgaacatcatataaatgatgcacataaaggtcatattgatgcagccatctttaacctaggttatttgcctaaaggtgataaatctatcgtgacaaagcctgacacgacaatccaagctattaattcattgctatcattaatgtcaattgaaggtattattgtacttgttatatatcatggtcatagcgaaggacaaattgagaagcatgcattgcttgattacttgagtactttggatcaaaagcatgcgcaagttttgcaatatcaatttttaaaccaacgtaatcatgctccattcatttgtgccatagaaaaaatttcttaagcatttgctgcgctatactatttataatttaggattgagtagtcaacatttgaaaaattaatgccaacaacaaaaagaggttttcaacttaatgaaaacctctttttatgctattaaacttacacagcaataattgcgtttaaactattttgcattgctgttgctctacttgcaatcgcatcactgatgaaattcaacaactctactttctcttgttgtaacttttcattgaaatgaataataactgttctttcatcgtcaacaggacgctctttgtaaatccattctaattcaactaaattattatacgttctcgtacgcttatacggtttaacttcaacaaatctgtccatttctttaagcgtcatagaacctttttgccataaagttagtaaaattaaaatttcttctctagacattttgtattcgctttcaatctcgctgaaaattgagttaatgtcacccaaaagtgtttctaattgcaaaattccaaatacagtgtcgttatttacttttttcatgctaaacatctcccaattaataatcacatatttagctactatacaagtattaacaaacatcccaacaatcccaaaacttgtatgtgctaacttatgcataaaactacaagtgtaaataaacttgctttctattcaattgtcaaagttgaataaaattaaataagtataaaaaccaataatcaatagagttaatatttagaaataagataatagtacataaaacaaatcactctattacatattaattttataatttatatacaaagaaaatatatcaatattaccattaaattgcaacaattctacatatatttcttcaaaaaagatacgcattgaatttttattacatataactctcatgaaaattgattaaactaaattaattagttagccttaaatttaacaaattaaatcaaaccgaatgaggctaaattggttatttttcaagatatgatttgtataaatcaaaacatttcttacaaatcaaatgtgtataaaatgtgatatacattttcaaccttaaaaaagttctaaaaaaagatgagcatctactgtctcatctttcagttcttttttacgggtctgttttctaatttgagcacaatcttcgatttctttatctaaatgactaccaattaaatctatttcttctattgttaaatcgctatctccatcttcttttatctctggtattattttttcttcaactaagtcacgatatagtgtttttgaattctcgttcaatttcgattcgtgattttgaatactttcttccgcaccaatgtatatctattggcactagcttctacttttgtaccatcaataaaaattgaattatcatcaataagattttgctttaaacattgactatagaactgaataaataaagattcaattaacgcatcagtattaggattcactctaaaacgattaatagttttataagaaagtgtttgatcttgggctaaccacatcattcgaatactgtcatgaagtaatttctctattctacgaccagaaaatacagattgagtatatgcatataagatgatttttaacatcatttttggatgataggatgttgcaccacgatgatgtctgaattcatcgaattcgctatcaggtatcgtttcaacaatttcattaacatatcgcgaaatatcattttgaggaattctaacgaagtttctattggtagtgtaagttggggtcatgttataatttttatacataaggcacctctttaatttagtttagtagtatttattaaattatacgaagggacccaacacagaaaattcattttattgaattttacatttatgtgcaagttgggaaaaatgtcttattttttcaaagtatttaaaagtaaaattacatgttaatacgtagtattaatggcgagactcctgagggagcagtgccagtcgaagaccgaggctgagacggcaccctaggaaagcgaagccattcaatacgaagtattgtataaatagagaacagcagtaagatattttctaattgaaaattatcttactgctgttttttagggatttatgtcccaacctttttagaatattaaatttctacaatttcgtcatcttcaacaataaagcccattgtattgacgctgttatttaagaaagtcagaatataacgcattacttcatcacgttctggctcattgtgaacctcgtggtaaaaaccttgccaagctttaaaatataattcaggtgtttgatatttttctttaaactcatcaattgccctagtatcaacaattaaatccttcgttccatacattaatagcgttggcattggttgaatgtcatgaatatgagccatcgtatctttcatcgtctcattaattgtattataccaatgatacgttgctttttttaacattaaaccatcgttaactgtttcttcaacaatttctaaattacgtgttaaatcttttggttctacaccaacattaaaacgtgtgtcttttgaaattttacctatatttgaaacaagtttatctttacgattttttccattcttttgaagttctagcataggagaaattaacatcatcccctcgattggcaattctactttttcaagtaaatttaataaaatcaaaccgccaagtcctacccctaatacataagtaggaattttatattcattagctatctttaaccagtctagcaaactttcgtgatacgtttgaaagttttcaatttgtcctttattagctcttgaagtttgaccttgaccaggcaaatctcccataatcacatgatagccatttcttcttaacatcgtaataacatatgcatatcttcccgtatgttctaatatattatgagcaataacaacgacgcctttcgcatcattttcagcttcccacttccacattattatactgcccctttttcattaatcttcaataacataattatagcaaattcactatgtagatttctatttatagtattattgttgtccatattattatatataaatgaaatcaacatcaataatagtgtaattatacataattatttttgattgtttttgatgaaaacgctttctcgaatatttttttcatgctaaacttattgtaaacacaagggtttggaggagtagcaatggcactattaaagaatttttttatcggattatctaataatagttttttaaacaacgcagcaaaaaaagtgggcccacgtttgggcgccaataaagtcgttgccggaaatacaattccagagttaattaatacaatcgaatacttaaatgacaagaatatcgctgttacggtagacaatttaggggaatttgtcggtacagttgaagaaagtaatcatgctaaagaacaaattttaacaattatggacgcgcttcatcaacatggcgtaaaggcacatatgtctgttaaattgagtcagttaggtgcagaattcgacttagaattagcttaccaaaatttaagagagattttacttaaagcaaatacttacaacaatatgcatataaatattgatactgaaaaatatgctagcctgcaacaaattgttcaagttttagatcgcttaaaaggcgaatttagaaatgttggtactgtaattcaagcatatttatacgatagccacgaattagttgataagtaccaagatttacgattacgtttggttaaaggtgcatataaagaaaacgaatcaattgcatttcaatctaaggaagacgtagatgcaaattacatcaaaataattgaacaacgtttgttaaacgcacgcaatttcacttcaattgcaacacatgaccatcgcatcattaatcatgtaaaacaatttatgaaagaaaatcacattgaaaaagatcgtatggaattccaaatgctctatggttttagatcagagttagcagaagaaatcgcaaatgaaggctataatttcactatttatgtaccttatggcgatgattggtttgcgtattttatgagaagattagcagaacgcccacaaaacctatctcttgctgtaaaagaatttgtgaaacctgctggcttaaaacgtgttggcataattgcagctttaggagctacagttatgttaggtttaagtacaattaaaaaattatgccgtaaatagagcaagacataaacaataatttaggagtctggaacaataatcaatgttctaggctcctaaatgttatattggcagttctgaaacatttataaatctttgattatgaactcacaacagtgctctatgcttttatagattttaataaattagccatttcaattgcacttactgctgcttcagcacctttattgccagctttcgtacctgctctttccacagcttgttcaatactttcagtcgttaaaataccaaatatgactggtacattagtttgatcattcactttagaaacacctttcgcgacttcattacaaacataatcataatgagacgtagcaccgcgaattacgcatcctaatgtaattactgcatcataatttcctgatgaggctaattttttagctactaaaggaatttcaaacgcacctggcacaaatgctacatcaatattgtcttcattaacatcatgtcgaatcaaagtatcttttgcaccttcaagtaatcttccagtgataaaatcattaaatcgactaactacgattgcaactttcaaatcttttccaattaatttaccttcaaaattcatgttaaaatcctcctatattaaatgacccatttttatttttttcgtttccatataatcatgattatgtaccgtttctggtacgataacttcaattctttctgcaatatcaatgccatattgttttaatccctcaaatttacttggattattacttaataaattgatatgttcgatgttaaaatattttaaaatctgtgcagcaatatgataatctcgcaaatcttcatcaaaacctaatgctaaatttgcagttactgtatcatatccttgctcaattaattcatatgcgcgtaatttgtttaacaatcctatgccacgaccttcttgaggtagataaataatcatgccaccatgttcattgatatacttcatagacgattcaagttgagcaccacaatcacaacgttgactatggaaaatatcgcctgtaaggcacgcagaatgtaagcgtacattttcatgttgtcgaattgcaccttttgtcagtacaactatctcttcatctgtgtatgtcgctttaaaaccatacatatcaaatgttccgaaatctgtaggcattttcacttttgccttaaattcaatttctggttctaattttttacgatattcaattaaatcatcaatcgtaatcatctttaattgatgtttttctttaaacttttgtaaatcttgtcctttcgccatcgtgccgtcatcattcataatctcacaaatgacaccagcgggcttggcaccagtaagtttagctaaatcaacagccgcttctgtgtgtccatttctagctaatacgcctttatcttgtgctactaatggaaataaatgaccaggacgattaaaatctttagcttcactactaggatcaatgagctttttggcagtcaatgtacgttcataagcactaattcctgttgttgtatctacatgatcaatactcactgtaaattgcgtaccaaagatgtcggagttatcatcaaccatttgtaccaaatccaaacgttgtgcaatatctttagacactggtgcgcatattaatccccttgcttctttcgccataaaattaatggtattatcgttcatccattcagtaaccgctactaaatcaccttcattttcacgattctcatcatctactacaataattggttctccattttttaaagccattaaagcactgtcaatattatcgaattgcatgctacccctcctaaaaaccaaatgctcttaatttatctacagataattggtctttatctttatttaaaatattttcaacatatttaaacaaaacgtctgtttctaaatgtactttatctcctaattttttggatgataaaatcgttgaacgcctcgtttctggaataagatgaatgtcaaaactgttatcatgcttatcaaataccgttagactaacaccatccacagtaatagacccttgcttaactaactgattattaatatgttggctacattgaatcgtaataatttttgcattggctgtttcatttatttttgaaactgttcctagttcatctacatgaccgaggacaaaatgtccaccaaacctaccgttaccactcatggcacgctctaaatttacttctgattgtcgcttaacatctgctaaataggttttattttcagtgcctttaattacttgaacagtaaaagatgtctgattaaaatcaatcactgttaaacatgcaccattaacactgatggaatcaccaatatgcatatctgccgtaatcttatgtgcttcaatttcaatcgtcctgactgattgacgaatttgaacacttttaacgacacctatttcttcaacgatgccagtaaacatgcatcatcacttctttcgtaaagttaatttaacattttgatttaataactcggaatgaacaatttcaaattggttcgcatctggtatctcaatcacatcatttgtttgataaaattgataatttccagatccgccaattaatttcggggcataatagagaataaattcatctatataattagattggagaaattctgaagtagtggttggacctgcctcgactagcaaagttccaactcctcttttatataaattgtgaagaattgttgttaaatcgcaagacttcaagtaaataatttcaatatgtgtttgattggttgttaaatttggattttcagtatatatccaaattggtgttgattcatcttgataaatttgctgattaaaatgaatattcccagacttagacaatattacttttatagggttttttccatcttgaatacgtgtagtatattgtggatcatctaattcaactgtacgtcttccagttaacactgcgtcgtgtcgatgtcttaacttatagacatcttgtttaacctctttgttagtaatccattgactttgtccattatcattcgcttgtttaccatctaaacttgcagatactttcactgtaatttgtggcagttgctttgcttttgctttaaaaaagtcttggtataattgtgatgcccgttcatcatcaacgcattcaatctcaataccgtgagcccgtaacgtctcatcaccatgtgtgtctaacgaattgtcttttgttgcgtatactacttttgctatcttacaatcaattattttgttaacacagggtggtgttgaaccaaaatgactacatggctctaacgtaatataaatcgtcgcaccttcagcattttgttgtgccatatcaagtgcttgaacctccgcatgcttgtcaccttttctcaagtgtgcaccaataccaacaatcctaccttctttaactacaacagcgccaacgggtggattaacacctgtttgaccttgtaccatatttgcaagttgaatcgcataatccataaattgactcaaatgatcacctctataaacaaaaatcctcacatcatgaattaagatgcaaggagaaaaatttatcgttaaataagcctatttgtacacatttttacaaatacgctacattatctttgtcgataattaacattctttctcccatccagactttaactgtcggctctagaatctcactagatcagccactaatatgaaacatattagcaggtcgcaggctttatttactgccggttgggaatttcaccctgccccgaaagaattatatatgaaattgttatagattatttgagtacgtagtatgtcaactacatttaaaatgatactatatgttttctgaaaaaacaattaatgacggttttaatttaatataatctgagtactataggcatctcattgatatgattcttactaacagacattaaaatcaaaccttcaattcgtctctatagagcgttctctttattatcttctagttacaaattattgattgtcactgcgctgttgttgctcattcgattctaaagcatcatataattgagatactgtatgcgcaacttgttctacaatcattttcacaccgtttcgtagtttattaacaccgtttgtcatttgacctatcgcaatcatatttgttaatgttccaaaccttggactaataacttgattggtttccggaatgatttgtatgcctcccattgggtgtgcttgtacaatttgtctattttcaagatttctaattaattgatcatcttgatccaattcatttaaatgactttttgcacctgtcgcgttaatgacaacattatatatgtctactgattcttggtttttgtatgaaaaataatacaacttgccatcatgtttcacatcttctaaatcttttttcaaaattaaagacttattttctattaattcaataattagttcagcagttcttggaggcattggatttgaatttaattgaatcatctttgagtatttttgattaaattgatgttggtcttcaatacttaagctattccatatccaatttaaattctctttcaaatgttcaatcatactttggaaaaggcccatttctgttggacgcgctaaatcatacttcaaatctgcaatatgatttcctgtacgtctatgtactaattttttaaaatcaatgtcataatcagcacattcttttaaaaataaagaaactaaagtatcaagcggtgcattgccgaaatgatgttttttaatgtcatttaatttgtctttagttaagtacttgaatgtcacgtctatcattgtacctcttacacttggtaaatgagcagaacgactcgtcatagtaattggtaattttggatgatgagcagcaacataacggacaacatctaaactggcaaggcctgtaccaataatcgcaatatcgtccagttcatttacttcgtctaacgtattatatgttggataaggcgtagcgatatatccttttttaccctttaagttatatggatcatggtaggcaaatgtaccacatgttaaaaatacataatcgtacgcttgccatgattgtcctgaatttgtagtacatatgtaataagttaaattcgtttcatcgatattagaatttgtataaatctcttgaactttattataattagttgatatatttggatattttttcgtgaacatagataaataagatttcatataatgtccgaatacaaatctcggtaaatatgcaggttcatcaaaattaaaatcagtttgttgtttataccacttccaaaattcagtctcatcatctaaatttaaactcatctttttcgaaggcatattaattagcagctcagaactatcattttgaaatggtacgccctgtcccatatttactttatcatcgtataaatctatatctaattgattaaacttcgggtgcttaactaactctctcaatacacttacaccagcagttcccatgcctattattgctacacgcatatatcatccatccttttgtaattcaaaatattatatttaaactattacctataattatagcaatttggtatttccaataaaatttattaaggtaagctattatttcactttcacaaccattaaaccatttaaaacttttcatttaatatcaaccttagtgtttgtgttaaaatatttttaacgaggtgaattaaattgaaatttatagcaaagatattaatctcattagtaattctatttatgatttttagtcgtaaaaacaaagcttcttaatcaatacccttgattacaaaataaattcaactaaggtgattggccatacactcaagatatggctaatcacctttttcaatgcagaacaaagagtatattttgcaaaatcaatatctataatttatctttaatacccttttaatactaaaaccaaatttaaattacatagtcatatcgtgtaatataccaaaggaacatagacattcatctatatagatgataatctatttaacgtctaggaggtatgttatgacgtataaagaactagcaacatttttaaaagttttatcagattcaagcagattagaaatactagatttactttcttgtggagagttatgcgcttgtgatttgttagcacattttcaattctctcaacctacacttagctatcatatgaaagcattagtaaaaaccaacttagttacgacacgaaaaatcggaaataaacatttataccagctcaatcataatatttttgagtccgtaattaataacttgtctaaggttcatacctctaaccaacgatgtatttgtcataaccttaagactggtgaatgctaatgatgacaactttagcgacactcatttttctagtaactttattatttgtattatggcaacctaaaggcctagatattggcattaccgcactaactggtgcctttattgctgttattactggtgttgtaagtttttccgatgttttcgaagtaacaggtattgtttggaatgctactttgacttttgtctcagtcattcttatttcattaatattagataaagttggattattcgaatggtcagctattcacatgcttcatgcttcaaaaggcaatggtttaaaaatgttcgtttatatcatattattgggtgccattgttgctgcatttttcgcaaatgatggcgcagcgttaatcttaacgcctattgtattagcgatggttaaaaatataggttttagtaagcgggccatattcccttttattattgcgagtggttttatagctgacacaacttctttacctttaatcgtgagcaatctagtgaatattatatctgctgattattttcatgtaggattcgttcgatattttagtagaatgattatacctaatttattctcgcttttagcaagtattatagtattgtggttatattttagaaaagcgatacctaaaacgtttgatgataataatataaagcatcctaaagatgccattaatgatttaaagctatttaaaatttcatggattgttctagttatattacttttcggctatctaatcagtgaatttactaaaattccggtatcaattttcactggaatcattgcttttatttttctaatgttggctcgtaaatcaaatgctgtaaatattaagcaagtcattaagggcgcaccttggaatatagtattattttcaattggtatgtatatcgtcgtattcggcttaagaaatgctggcattactttaatattggctaaaatattagaatatatttccaattacggtctatttagcactattttgggaatgggcttcatttcagcgtttttatcatcaataatgaataatatgcctacagttttaatagatgcgattgctattggtcaatcaaatgtccatggcatgttaaaagaaggcctaatttatgcgaatgttatcggttctgatttaggtccaaaaattacaccgataggctctttagctacattactgtggttacacgtcttaacacaaaaagatgttaagatttcttggggcacatactttaaaactggtatcatcattacaattccagtactatttataaccctcatagggttgtatctaacacttatcatattttaattaattaggagattgttatgactaaaaaaacaatttattttatatgtacaggcaactcatgtcgaagtcaaatggctgaaggttgggctaaacaaatcttagcggatgattggaatgtatattctgctggtatcgaaacacacggtgttaatcccaaagcgatagaagctatgaaagaagtaggcattgatatatcaaatcatacatcagatttaatcgataataatattattaaaaattcaaatttagttgttacattatgtagtgatgcagacgtaaattgcccttctttaccaacaaatgttaagaaagaacattggggatttgatgatcctgcaggcaagccttggtcagagttccaacgtgtaagagatgaaattaaaatcgcaattgaaaatttcaaatcacgatgagagtgggacagaaatgataaaaaaacactaatgatttattatgtagtggttctttatcattagctataactaatgtgtacttaaaaataggaatacatgagtaaaactcatgcataagaaatactaatttctaaagaaaaagtaattctttatcgatgtcctgccccacttgcattggtgggattatcaatcaatgtgttttctctaatgcaaaaagacgctttctatcaaaacaagatagaaagcgtctttttagtatgtccgagtcataaaaacaactcgtagcttatcaaattacttattcaaatgtttactgtcatctttatacacaaagtatttgaagtattttccttcagtcttcatgttcttataaaagtcagcgataattgttgcattactttctgcccacttaatatctgtagcatattgatgttctcctggattttttggattccatctcatactatacaatgtattttgatctgtgcttgataagaagtgcttatgaatgaaatcagcaccgcctgaaatagctttttcaggtgtatcccaaccatgctttttagcatattctgcacctgttttaattgggtctttatcaagggctcctactccatagaaattgtagtactttttgccatcaatttcgactccattagctaattcacttttaactgcgccagtttctaataatgcatgtgaaattaaataaacttcgttaacgtgcttatctttagcagcttttaagaaatcatccgtatgtttcaataacgttggtctatctactaacatacgtttaattctatttttatcaatcccttgatactttgataaatctaaaaattgatatttttgcttttcattatcgataaaagtaccgctatccattgcacttttaatttcagttgcagatgcatctctccatgcatcattctttttatttgatacctgttgactcgtataattatttatttgtttctttgctgcatcgtttaatgtaacatttaacttttcaatcttaatgtcggatttaacatgtttgaaaaatatctgatcggatatcattgagaaaaataaaaatgagacaacagcaaatatgacaacaagtcctattattccaaaaatagaacctttcttgtgtttattcatatccacacctcttaggtcattgttgttatacattcagtttgactacgataataaagtttaacattattaaaaccgtttaacaattttatctatgcattgttacatattcataaataaacagtaatgtaaatgaaacgttttaaaccatttatcaacattactttacgttgatctacgaatcataaatgttttatctttttgtataacctttgaaaacctttatatcaataatcttattattcacgtattaaaaaacaaaaaattcttttgttcgtttacttagtttcttttttataatccatcataataaaacttgctgcatttgatctatttttataatagtactgatttaaatcaatcgtgccttcaatttgaccatcacgatacatcatttcattagtgaagttatttatcatcacgaaatcagcgcgatctcttataacatctaaatcgtcgtttcgtgcaaaaaaatgttctaaatttaaatgtgcgtaatccattgttacctcccgattacaaattttgttctatctactatttagcaaagtaataatacatcatatcacattaaattaattacttatgtcttatatttaacacttaatttagcgattacgcaaatgaatgatttttctaaatattttattctaactttatccggaaatatttgttatacgtataacttggagaatgactacttgaaatttaatgacgtatacaacaaacaccacaaaatcatacaccatcttttaaaaaaatataatattagctataattatgatgagtattatcaactactcttgataaaaatgtggcaattgagtcagatatataaaccctcaagcaagcaatctttatcctcttttttattcactcgattaaatttttaccttatcgatttattcagacaacaaaatcaattaaaagatgtcattttatgtgagaataattcaccaacattaactgaacaaccaacatactttaatgaacatgaccttcgtttacaagatatcttcaagcttttaaatcaaagagaaagactatggctcaaactataccttgaaggatacaagcaatttgaaattgctgaaatcatgtcattatcgctttcaacgattaaattaattaagatgtccgttaagcgtaaatgccaacataattttaattagtttattgtgaaatttcggtcgatgtgttaatgatgttgaaacaccctaacatcttcatataaatttattttaaccattaaattaacaacttattaaacgaggagtactatatttgcaagacaattctactaaatatctactttatatccaaactgctacttcaaaccatctcgaaacaaattgtgtctttttacattgcgattacattcttaaagttccaattaacaaactcgtttcatattatgcgaaattgcatttatcatcacaaagtgtgctaattgagactgcaaaaaacatactaaatattaataaactggttcctatttacatcaacccaaaaactatactttttccgttaaaacataaacgtgcaccgatacaaatttatatcaatgcacattatattgttggtatgactgccatagagaattcaacattaatacattttcaagaaggcattcagctagaagttgatgagccattttctctagtttcaaaaaaatgtcatgaaagtttagctttgaagcacttcattgaaaatactatttcgaattaaatttaatttctaaaagtttcttagtaaagtatgatgtcacaatttttataaaatatatgctagcaaacattaataaaatcgctccaataattgttaaaataacaacagttgtagataaatctaccttaggactaacgaaaaattgtacgccagatagacttgtaattagcccaaataaaaacaaacctaataaagcaacataagcaaacatcatcactactaatgtaacaaacatactataactttttgtttctttatttcgaaatacattttgtcttaagtaagcattagcaaaggtaacaggcttatttaagttaacgctgtcatcatcagatatagaagacaatcgttgatctaatgcttgtttctccttcttgttcaaaaaccataattgctttttaacttttttatcaaatgatgctttattcataattaaggatttctctcctttataatattgacgtaattttaaacattagcgtcaattgaaagtgtattttatatattttacagaaatatatgtatcaaatctacaaaaatccatattacaatttcatttatggtgatttgacgctaaaatacagtctgctaatttttcaaactaatgctttttaggtaggtacaatgataaattttaatcgtaaatatgtttcatatattatgaatctagccttaatcatattgcattcaaaataattttaaaaaatgaaaagaaaggatttagcatgcaaaaattcaaagactttttttacgatgatttatcggttacacgaggaaattattttttaactttaatggcagcattttttattactatcattttatttatcggcatagttgtcagtgaagtacatttactttatagcatgctaattgtattagtaggtttaattctattgaggctattcaaaatcaatttattctcttttaaaaaattaacattgtctcaagttatttatattataggcggtgcactattaatttatgggttagataatctttatttatattttcatgacgtaccggcaaatgaacaacaattagagcaagcaatacgaaatacaccattctatatttctattttcactgttaccatcatccccgctattgtggaagaaattgtttttcgcggtatgataataagggttatcttcagaaaacacttgtttttagggttaattgtgtctagtttagtttttgcatcattacacgaatctgacacttggattggttatttaccttacttatattctggtttgatttttggcctaatttatataaaaacaaaacgattagaagttgtaatattcatgcacttcttaaataacttgttagctctgctctttataatatggagataattttgagataacctttcatattattttcaaattatctatctgatatttattttattgaacttgagtcaccacttaaactcaaaaatacgtgtcatcaagtgcaaaataatttagaactaatacaaacataaaaacttttactttacgcttaaaatcaaaagtcacatacctagatataagtacaacttgtatattttgtactctaataggtatgtggcttaaataatatttaattcttgagttgcatatagtaactgtttttattcattttctaaaatatgcaagactaatttccttttctactcctgttgaatcaatttagacttttttataactcgagcttttacttagctgaattttgacttcttcttcattaataactatgatggaaaaacccccataagcacaatgcctatgagggtttaaatatatttatatattatagaatagaaagacctgaagattgaatatctttcgcaaagcctttaactgtatctactgataattcgttaatatcgcgacctaagtttgtattcacttttttcacaacatctgctgggcatgtaataatatctgcaccaatttcatcagcttgaatcacattgaataattcgcggcaacttgcccataataatttaacgccgtctttactatgcgtaacttttacagcctctttcattaatggtaatggatctacgcctgtatctgcaatacgtcctgcaaatactgaaacatatgttggcacaccttcagttactgcttcagttatttctttaacttgttcaattgtgtaaacagccgtaacgtttaatctcacattgtcagctgaaagttttttaattaaaggaatcgttgattcaccttttgtatttacaataggaattttaacaaatacattttcgccatattgttttaaaattgctgcttctttttccatagtttctaaatcgtctgcaaatacttcaaatgaaattgaagcatctggaatttctttcacagcttcttcagcaaaagctttgtaatctgttacgcccgctttagccattaaactaggatttgttgtaaaaccatccacttgtttgtttttataagctgctttcatttcttcaatatctgcaccgtccgcaaatacttctacatttagtttagccatataatatagcctccttgattcttattaaaattttaacaacatctgcatgtctttttcttacaaccatttgtaaaaaatgatttttatttctttgttatataaaacatttatatcacgcttttataatatatagctaattttttgcctatattttttaaaaatgactttagcaaacattgtgtctacaagttaataaaactattgttttatgattgtttatgatacgatatgtaaatgataatcatccaggaggtctagcatgtctcgttcaaaaaaatacttttacttatctagcttaatgattattttaagctttttctttaatacaaataacgttttcctaagtggactttttaattcttttattaaattaatacttttctgcagtgttattaactcaattgtactaattttgtctataatttttgcagatcgttcaattaaatcactaaagcctgatgcagattggattagaattgcgagtaaaagtttgccttggattattctaattgttattttagtacatatcttttcaattgttcgtacattcggttttatttaaaaaagttaatatgtcattgtagccttaatacaaaacaatacaatgtatcatgctataatgagtaaaacaatttgataacgttgttgcgtataaaaaatattagattttcgaaatcataactatgcatctaatcgctatagttatacaacaagatataacatataatgaggtttgataatgcatcgacaatttttgtcgtcgcgttgccaaaacctcttttttaaattcaaactacttcttttcgaggtgaaccaaatgcaatatgtatatatttttatcggtggtgctttaggcgctttattacgttacctcatttcttttctgaatactgacggaggttttccaatcggaacactgatagccaatttgactggtgcctttgtaatgggattgctaacagccttaacaattgcatttttttcaaaccatccgaccctaaaaaaagctattacgactggttttcttggtgctttaacgactttttcaacatttcaattagaattaatacatatgtttgatcatcaacaatttataactttactactatatgctgtaacaagttatgtctttggtattttgttatgttacgtcggtataaaactaggtggtggtttatcatgatatcaatcattttagtcatgattggcggcggttttggcgcaattgctagaagtgccattactgattattttaatcataaatttacttcaaagttacctatcgcaacattgatagtaaatctagttggtagttttttaattggattaactataggcttatcaatttcaatctcatggttccctgcgttctttgttaccggttttttaggtggcttaacaactttctcaacgttagccaaagaacttacactaatgatgacgccaaaatttaatattaacctttttctcaattattcacttttacaattcatcattggatttatagcttgttatattggctatcatatttaaaaataaaatgcttcattcagcaaataggtaaattacgacaccttcctgaacgaagcattttttaattttcatgcaaatttttaagcaccatataatgcctaccaaatttcaataatctttgttgccgtttaaataatgtgaatgtcaataaattctccaaactagtcgaaaataaagggagtgggacataaatccctaaaaaaagcagtaagataattttcaattagaaaatatcttactgctgttctctatttatacaatacttcgtattgaatggcttcgctttcctagggtgccgtctcagcctcggtcttcgactggcactgctccctcaggagtctcgccattaatactacgtattaacatgtaattttacttttacatactttaaaaaataagacactttgcccaacttacactaccaatagaaacctctgttagaattcctcaaaatgatatttcgcgatatgttaatgaaattgttgaaacgatacctgatagcgaattcgatgaattcagacatcatcgtggcgcaacatcctatcatccaaaaatgatgttaaaaatcatcttatatgcatatactcaatctgtattttctggtcgaagaatagagaaattacttcatgacagtattcgaatgatgtggttagctcaaaatcaaacaccttcttataaaactattaatcgttttagagtgaatcctaatactgatgcgttaattgaatctttatttattcagttccatagtcaatgtttaaagcaaaatcttattgataataattcaatttttattgatggtacaaaagtagaagctaatgccaatagatatacatttgtgtggaagaaaagtattcaaaatcacgagaagaaatagatttaattggtagtcatttagataaagaaatcgaagatttaaatcattctatttagaacgaagattgtgctcaaattagaaaacagacccgtaaaaaagaactgagattaagaagttcaaaaagaaatttgatgattattccgaaagaaaaaataaatatgaagaacaaaaatcgattcttaaagatagaaatagcttttctaaaactgatcatgatgcaacttttatgagaatgaaggaagaccatatgaaaaatggccaacttaagccaggatacaatttacaaatagcgacaaattctcaatttttttatcctatgacctatttcaaaccccaacagatactagaactttaattccatttttaacaatgattcaaaataccttcggttatttaccagagtatattgtagctgatgcaggttatgatagtgagcaaaactatatggctattatagatgattttaataaaacgccacttattacgtatggcatgtttattaaagataaaactagaaagtttaaaagtgacatttttaacactcaaaattggaaatatgacgaacttaatgatgaatttatatgtcctaataacaaaagaataggttttaaaagatatgcataccgtaatgatagatatggttttaaacgtgacttcaagctatatgaatgcgatgactgttcagcatgttctttgaggcaacaatgcatgaaaccaaattcgaaatccaataagaaaatcatgaagaattataattgggaatactttaaagcccaaattaatcaaaagctttctgaaccagaaacgaaaaaaatctatagtcaaagaaaaattgatgtagagcttgtttttggatttatgaaggctattttgggtttcactcgaatgtcagttcgaggaataaataatgttaaacgagagctaggttttgtattaatggcacttaatataaggaaaatagcagctcaacgagctgtacattataaaatacatatcaaaaaagctgatttctatcaaataattaatagaaatcaacttttttacattgcctaagaacttaatgtcccaagccctgacaattcatctaaccttttcatcagttgagtgattttaatctagccttcaaatttttttggatcaggtccaattctcttatcttgatttaaaccatcaattcgcgtcatttgttcatctgataattcgaaatcaaatatttggaaattttcagagattctgtttggtgtcaccgatttagggattgtaaccacagcatgctgcacattccatcttaaaacaacttgggcaggtgactttcctaattcttgagcaatgtctttaattgtctcatcatttaaaatttgtgcattcatcaatggtgaccaagattccatcacgatacgttgtgctgccaaatataatttcaatttatgttgggttaaatatggatgatattcaacttgattaattacaggtttaattgacacttgtgccaacaaagcttccaaatgttcaggttcaaaattgctgacacctatatttttaacattattatttttatataaatcttccatacctttccatgtatcaaccattacggcttcgttcgtacctggccaatgtactagatacaaatctaagtattttaaacctaatctagataaactagcttcgtaagcagctgctacattttcacgaccgaaatcctcaaaatataattttgaagtaataaataagtcttctctagcaataccagttgactccaatccggcacgaatgccagcacctacttgttcttcattcccataaacttttgcggtatcaatactacgatatccttgttcaatggcatacttaacactttccatgcaattttcatcattttccacacgaaatgtccctaaaccaatttgtggcatcgtgtttccattataaaatgttttaacctccataaatatcgcctcacctttttgatgtattataccctgttatcataacaaatctgagttgaatacatgagaaaaaacacttagagcaatcaaccactaaaattctagtaatatctctcaaatattaatcaaattgtaaaagtaattctgtttaatttatgacaaactaaaaaagccgaagtaacaacatatagtcatcacttcagcctaacatttaattgaatgattcaattttatccatcatttgttgtaagtcttccacgttgtattgaatacgaccatggaatacaaatttgttaaagaactcgtctaattgttcagcaccgacaagcactttgacagcactattttgattataatttgaaatcgttacatcgccttcatttttaagattaaagtataaaattgaagttggtgtatatttggcacctaattctttttgtaagtcttcagccaattgtttaatcgcctcaatttgatctgaataatttacaaatgataatgaacgtttgtcatcattttgatccatcacaatagtttgcggtctagatttatctaaatccaatgtatcaaatacttgttccattggtggtaaatctttaaattgaccgccactaataccattataaacatgaccttttaacaattgagaatcaataatataaagaccagttcttgttaatactaaatgactaattcgttcaatattattaaagccatcctttggtaaaaagatatttgccataatgtgcatatcttctggtcgaattcgtttttctttaactaatctttcacgaataccaattaatctcatgtccgttacatattcactatgatttttcgagaacaattttaatgcgtcaatctcacgatcttttgtactaaccatgtgattataatcttcttgttgttttgtaattgtctttttattttgaatacgctctttctctaaagcttcttcatgagactttttaatgttttgttcttgttgttcatacttttcttctgtttgtcgcttaacttttttcttactacctaaggcaactaaaaaaaggacaaaaaagattaatgcaatgactactgcaataatgagtccaatgactatcggtgaagataaatccatcacaacaacgctcctttttaatatatgaataactttaattataatagaaaagctaaagattttcgatacatattatcatttatataccgaaaatcttttatttagctatattcaattcatcttattattttactgcgtcttttaattcttccactttgtctaatttttcccatgggaataagacatctgtacgtccaaaatgaccataagcagcagtttgtttgtaaatcggttgtttcaaattaagcattttaataatacctgcaggtcttaggtcaaagtgttttctaactgcttcgacaagttgcccttcagaaactttacctgttccaaatgtatcaattgcaattgacactggttctgcaacaccaatcgcatatgccaattgtacttcacattgatctgctaaacctgctgcaacaatatttttagccacataacgtgcagcgtatgcagctgaacggtctacttttgtaggatccttaccactgaagcatccgccaccatgacgtgcatagccaccgtacgtatcaacaatgattttacgtcctgttaatcctgcatcaccttgaggtccaccgattacaaagcgtcctgtaggattgatgtagaatttagtttgttcattaatcaagttttctggaacagttagataaatgacatgtgctttaatgtcttcttgaatttgttcaagtgtcacatcctcagcatgttgtgttgatacgacaatcgtatcaatacgtactgggttatcattttcatcatattcaacagtgacctgaactttaccgtctggtcgtaaataatttaacgtaccatctttacgcacatctgataaacgttttgccaattgatgtgataaataaattgctagaggcatatacgtctctgtttcattcgttgcgtaaccaaacattaaaccttggtcacctgcacctgttgcttcaatttcttcttcgctatctttatcacgatactctaatgctttatccacgccttgtgcaatgtcaggtgattgttcatcaatcgcagttaaaattgccattgtttcataatcataaccatattttgctcttgtgtatccaatttctttaattgtttctctaacaactttcggaatatcaacatatgttgttgtagaaatttcgccggcgatcaatgccatacctgttgtaacagttgtttcacaagctacacgtgcatttggatcgtcttttaaaatagcatctaatattgcatctgacacttggtcagcgattttatctgggtgtccttctgtaacagactctgaagtaaataatcgtttgttatttaacatagtttgctcctttaaatttatattacgaaaattctctctctgtgagctaaataaaaaagaccttctaactattaatatagagagaaggcctaatacgtccattcgctcttatcgttcagacctatttgtctgcaaacggtttggcacctttcttttataaaaaagaggttgctgggtttcattgggtccatgtccctccaccactcaggataagagaatccgttaaaaataatagtacctaattaatgaattaatgtcaatttttcacaaataaatttacagtaaaatattgtagattaattatgttaatgtgttatactaattaaatgtaaaggcttacatttaaattatcgctttggagggatttaggatgtcagtagacacatacactgaaacaactaaaattgacaaattactgaaaaaaccaacgtcacattttcaactttcgacgacacaactttataataaaatcttagacaataacgaaggggtattaacagaacttggtgctgttaatgcaagtactggaaaatatactggtcgttcgcctaaagacaaattttttgtctctgaaccttcatatagagataacattgattggggagaaattaatcaacctatcgatgaagaaactttcttgaagttataccataaagtactagactatttagataaaaaagatgaactatacgtatttaaaggctacgctggtagcgataaagatacaatgttaaaacttacagtcatcaatgaattagcatggcataatttatttgctaaaaatatgtttattagacctgaatcaaaagaagaagctacaaagattaaacctaacttcactatcgtttctgcaccacattttaaagcagatccagaagttgatggtactaaatctgaaacctttgtcattatttcatttaaacacaaagtcattttaatcggcggtactgaatacgctggtgaaatgaaaaaaggtatcttctctgtaatgaattatctcttaccgatgcaagatattatgagcatgcattgctcagcaaacgttggtgaaaaaggcgatgttgcattattctttggtctatctggcactggtaaaacaaccttatcggctgacccacaccgtaaactaatcggtgatgatgaacacggctggaataaaaacggggtctttaatatcgaaggtggctgctatgcaaaagcaattaatctttccaaagaaaaagaaccacagatttttgacgcaatcaaatatggtgcaattttagagaacactgtagttgcagaagatggttcagtggactttgaagacaatcgttatacagaaaacacgcgtgccgcttatccaattaatcacattgacaatattgtagtaccatctaaagcagcacatccaaatacaattattttcttaactgcggatgcatttggtgttattccaccgatttcaaagttaaataaagaccaagcaatgtatcatttcttgagtggtttcacttctaaattagctggtacagagcgtggtgtgacagaacctgaaccatcattctcaacatgtttcggagcaccgttcttcccgttacaccctactgtttacgctgatctattaggtgaacttatcgatttacatgatgttgatgtttatcttgttaatactggatggactggcggaaaatatggtgtaggacgtagaatcagcttacattacacacgtcaaatggtaaaccaagcgatttctggcaaattgaaaaatgcagaatatacaaaagatagtacgtttggtttaagcattcctgtagaaattgaagatgtaccgaaaacaattttaaatccaattaatgcttggagcgacaaagagaaatataaagcacaagcagaagatttaattcaacgttttgaaaagaacttcgaaaaatttggtgaaaaagttgaacatattgctgaaaaaggtagcttcaacaaataaatttgaatactaaatcaaaaccacccgtgtgaacgggtggtttgttctgcggctataagccttccttactggccagccctaaaagggcactgacaagtcagccaactgcactactattccagcaaccctaaagggttactcttttttctttctttttttatttttctctccagtgaaaggatctaaatattcttccattgagatttggtctgcaacgatatcctcttgtaattgattacgaatataattttcaatcacttttttatttctacctactgtatccacataaaatcctttacaccaaaactttctatttccatatctatactttaagttagcatgtctatcaaatatcattaaactactttttccttttaaatagccaacaaatgatgataccccaagtttgggtggtatactaactaacatatggatatgatctttacatgcctctgcttcaattatctctacaccttttctttcacataattgacgcaatataatccctatatctttttttatttttccatatatcacttgtcttctgtatttaggtgcaaagacaatatgatacttacaattccattttgtatgtgctaaactgtttgtgtcagatgacattaaatagcatctcctcgtgttgattattttggttggctgaccaatatttattctagcacgtagagatgcattttttgtgacaatggtagaaccttttctgaaccatacgcatagcgtatggttttctttttacaattaaagagccaaccgttgttatagtctaacaatggttggctcctcttattttatgtgctaaaaatttataggcaattttattacaacaatgtacatttaaggtgaccttcatgccaaaatcgcatcactcattaatggaagcagcacgtcttcatataaagtaccgatccctaattcaacgcatgtagtaccacatcttcaaagcttgatagttcccatgcgcacaccacgtttcatactagctatgcgactcaacttggttcataaactctttaatataagtcaatgtttcaaccatcgctggtggtcttggcacatgtccttctgccatttgataaaatgtttcatgcgtggcaccttttaactctagttggtccgctaaataatacgcatgatgaataccaacttgctggtctttccctccatgtacaattaatattggcggactgttttcattaatgtttggaatcgcttggcgtgcctcatatgccgctcgatcttttttcggatgaccaatcattcttcgtagcatgcctcttaaatcgacacgttcttcatacattaaatcaatatctgagacaccaccccagattgtataacttgttactggtaagtcttgaaatgtcaacaatccttgtaaaccacctcgcgaaaaaccaaccatgtggataaatgcatgtggatatttatcatgtagcaaccttaataattgcgtcacatcatttaaatcgccacggtaaaattcgtctttgccttcactcccattgttacctcggtagtatggcccaatcactaaagtttgactatctgaaaattgcattaatctacctgcgcgcacacgtcctacttgacctttgccacctcgcaaataaactacaatgcgatttacttcatgatgtggtgtcatcattaaagcttttacttgtaagtcatctgacaaatatgtaatttcttcgaattgatgcgtaaaatattcaattggcattcgtttacgtttgataaaacccaagtgattgcaccctctctacgcattttaaaatggtactatcttgcagtaagaaactccgttgtgcgagttcaatatcattgatacagttaaacaacactggccctgctgtttctaaataatcgttcttgcttaccaatgattcaacttcgataaaatatacatcttttacaaaatcagtttgatcatgtgtttcaatggtatattgtgctatgtaataaatatttttaactttggcgcctgtttcttcatataattcacgtgtaactgcttcagcactactttccccgcgttcccttttaccaccaggaaattcaatcccccgtaaattatgtttggtaaaaagcaattgatttttaaacgttggaatagctagcacatgattgccatctgctatctcattatcctttttaaatgtcaaattaacttgacgattatctttatccctaaacttcacgcgcatcacatccctacattgtatgttaatataatagttaattactatcgttggaggcattaattatgaaaaagatattcttggcgatgattcatttttatcaacgtttcatttcgccactcactccaccaacttgtcgtttttatccaacatgttcagagtacactagagaagcgattcaataccacggtgctttcaaaggcctttatttaggtatccgtcgtattttaaaatgtcatccgcttcataaaggcggctttgaccctgttccgttaaaaaaagacaagtcagcaagcaagcattcacataaacataaccattaatatggttgtaattgagttatatccactaaaggggggcgaaattcgagtcgcccctcttttaatatgcctgaatgcgccaccacatcttgttcaaaataataacctgctggtgtaacatctcctggataatcacctttacgagcaagcatcgctgtaaaatagcggcttaaaccatattcgtacatgccgccaataaccacttttgcaccatgacttttcaaagtatcaattgccgtttgcactttatcaatgccacctagacgaaatggttttaatacaacaactttcacattgtataattctatcaaattaattatgtccaacaacgatgttgccttttcatcaagggctattggaggtattgttccatccgctacttcatcaagcatggagatatctttaaatggctcttcgatataaagaacctgttcacgcgctaataactgtaactgtgtgaaatcttgacgatccaaggactcatttgcatctataaccaattgaaagtgaaagtctaattcccgtaacactctaatttgatgcatgatttgaggcgtccattttaatttaattctggtcggctttgttgcttttaatgactctagttgtttatttgataagccgctcgctgtcgctccatatgctactgaaaatgaaggcagtacatgaaacatttgatacaatgccatgacaatagttgcccttgcagcaggcgtattttccaatgaatctactaattttagtgctgcttcatacgtttcaaatgatttatttctattatcttcgaaccattgctcaattacatgtttcactgaggcaattgtttcatgatcataccaatctgtttgaaaagcgttacattccccgaaatatgcatttcctttgtcatcaatcaattcgataaacaaacaatcacgatgcgttaaagtgactttcggtgttacaatttgtgacttaaatggctcactatatttataaaaatgcaaagctgtcaacttcatcaaatcatcctctatacaacttatttctttgtaatttacctgttgatgtataaggtaaagtatcaaccttttcaaagtgtttcggtactttatatttcgctaaatgttgtgataaatatgcaatcaattgtgcctttgaaatgtcactttcactgacaaaatataatttaggcacttggccccaagtatcatcaggatgccctacacatactgcgtcactgatacctggaaattgcttcgctaccgtttcaatttgatatggataaatattttcaccgccactaataattaaatctttacgtcggtcataaatcatgacataaccttcatgatctatttcagcaatgtcacccgtattaaaataaccattttcaaacgtacccgttaaatctgttggatacaaatatacattcatcacattggcgcctttaatcattaattctccatgaccttctttattaggatttttaatttttacgtcaacattggcacttggcatccctacagtgtcaggacgtgcatgcaacatttccggtgttgctgttaaaaattgcgaacatgtctcagtcataccaaatgaattataaattggcaggttatattgtaatgccgtctctatcatagtggcagataatttagcaccgccgagtaatattttttgtaaattataaggttcatgtaaaccttgttgcataagccaatttaaagtttgtggcacaagcgaaatgtgcgtgattcgttcatttttaatcatcgttaaaatttgttcggcattgaatttatcaacaatgcgcacagtaaaaccttcaataacagctcttaaaagtacactgagacccgaaatatgataaatcggcaagacagatagccaattagtgtcacgatcaaatcccaagctctctttacatccgattgcactggcataatgattacgaaacgtttgtggcaccgctttttgagggcccgttgtccctgatgtaaacataatcgatgcaatgtcatctaaattaaatgatgtatttaatatgttggacggcgactctttcggcaccacagtttcattcgatgtttcatattggatacccattgtgttgtccaacaaactgttcgttgtaatatcccttccagcgaattcaatatcatccagcgatacaatttgaaaccctcgtaattccagtggcaaggtacaaaaaatcaattgtacatcgattgacttcatctgattcgtcatctcattaggtgtcaaccttgtattaatcatcgcaatttcaatatttgccaaccaacatgcatgtattaaaatgatcgattgaatcgaattatctatgtatagcccaacacgagattgttgataagccttgagtcttttagccaatagactcgcttcacagtataaattttgataagtataagattcttgaccgtctgttatcgcaatatgatgtccattttgttgtgcttgtttatataaccaaaagtccatgcgttattcctccaaaatcatttacattataattataacgattttatgacattctagcagtggttatgtttaaaaatataaaaaagtagacgaattgatgcattgatatgattgttataatgctcaatacatatcgttatatcattcgtctactattatcagttatttttatttaattttagtgtcattctgtcattttgatgtggtgatttacccattgttgccacatcatctgcaatgtcaattggtatacggttcatgtcttgtaatgcacttaaatggaatacttcatcatctaaattttcaatgagatatacataatatgttaccttgtcctttttatattttaacgttttccaaaagtccggcttgcaattcaatacattatccggaatatattcaataaataagtaacgtttgctgcctactttgtctatgaaatattttgcagtgcctttttctatacctcttatatgtgcatagtctgctgaaaagtaaatactacctattgtttcattatgttgttgtatttcaaatcgttggcctactattttattatttgtgctacaactacttaaaaaaatcagtagatatagcattaaacatattttcatccccttgaattttaaaaactttttcaaaagcaacacctctaaaaataaatacaatatattatagcaaatagaaattattattttgttaaattatgttgtcatgttcgtgtcattttgagtcgtaatacaactttacaattattaaattaacacttctacaatccaaaaatatttttaaagttttgaaaaaaattaaagtatttccactactaatttggtaaaatatgattatgtgatatagtgaaagcgttttacacttaataactccctcttaaatgcatccaggttttatgtagtaaatcatgaaaataacatataaatatagaggagatttacctttgaatacagagaacaacaagaatcaaaaccaatctgttaaaaattctgaaagacgcggcatgttaaaaggatgcggcggttgccttatttcttttattttattaataatcttattatcagcctgttcaatgatgtttagtaataatgacaattccactaataatcaatcatcaaaaacgcaattaactcaaaaagatgaaaataaaaatgaagataagcctgaggaaaaatcagaaacagcaacagatgaggatttacaatcaaccgaagaagtacctgcaaatgaaaatactgaaaataatcaacatgaaattgatgaaataacaacaaaagatcaatcagacgatgatattaacacaccaaacgttgcagaagataaatcacaagacgacttgaaagatgatttaaaagaaaagcaacaatcaagtaaccatcatcaatccacgcaacctaagacctcaccatcaactgaaacaaacacgcaacaatcatttgctaattgtaagcaacttagacaagtatatccgaatggtgtcactgccgatcatccagcatatcgaccacatttagatagagataaagataaacgtgcatgtgaacctgataaatattaaacaacaagcgaattgaattcaaattgtatttagctttatgcactaatcacatagtaaataatgagggagattttttaggcatgagcaatcaattcaaaagcgaagaagagcgaagacaatgggaacaattccaagctttccaaaatcaacaaaaccaacagaaccagcaatacggacaaaagaaatctaaaaaaggatggttctggggctgtggtggttgtctagtattatttattttaattatcatcggtatttcagcttgtacagctggtattacaggtaaccttggcggaaatagttctaaagaaacgaacaaaacccataaaatcggtgaaactgttaaaaatggcgaccttgaagtcactgtaaattcagtggaaactatgaaatctgtaggaccatctcttgcaccaacaaacgctaaaggtatatttgtcgttgctgatgtgacgattaaaaacaaaggtaaagaagcgttaacaattgatagttcaatgtttaagctaaaatccggtgataaaacatttgaagcagataatacaggttcaatgtctgctaatcaaagtgacaatggtagtatagaaaattcatttttcttacagcgtataaatccagatagcactgctcaaggtaaaattgttttcgatgtgtcagaaaacatagccaacgcaaaagataaaaaattagaagttatttctagtttatttagcgtcaagaagattacatttgatttatccgatgctaaaaaaacatcaaaagctaaaaaagacaagcaagatacagaagtagctgttgcgagttcaaatagcgataatgtaagttatgaagcttcggctactacacctgctacaacttctagtgcggatactgattctgaagatagcgaaaagtctagtaaagatgaggataagcagaatgcgtctaaaagtgataaatctagtgtagaaaaaagtgaatctaatgaggaaactgctcctgtagagcccatgccccatagcaaacctaccactagtgaagcaccacctagccaaaatattcacaatgaagatagcatgtacgacgcttcaacagaataaaatttcagggtagctcggctacccttcttttacggaaaaattaattatacataatcaaatcaaggagataaaaaaatgaaattcaaagctatcgttgcaatcacattatcattgtcactattaactgcctgtggtgctaatcaacataaagaaaatagtagtaaatcaaatgacactaataaaaagacgcaacaaactgacaacactacacagtcaaatacagaaaagcaaatgacaccacaagaagccgaagatatagttcgaaacgattacaaagcaagaggcgttaatgaatatcaaacattaaattataaaacaaatcttgaacgaagcaatgaacatgaatattatgttgaacatctagtccgcgatgcagttggcacaccattaaaacgttgtgctattgttaatcgacacaatggcacaattattaatatttttgatgatatgtcagaaaaagacaaagaagaatttgaagcatttaaaaagagaagccctaaatacaatccaggtatgaacaatcatgatgaaacagatggtgagtcagaagacattcaacatcatgacattgataataacaaagcaattcaaaatgacataccagatcaaaaagtcgacgataaaaatgataaaaatgctgttaataaagaagaaaaacatgataatggggcaaataattctgaagaaactaaagttaaataatggcatactttgattaatcgtaatttttaggagaaacgctatgataacatttgagaatatacaacaacttgagaaatacaccttaatgactatgcatggtctttttaatcaacttaaactcggcattatttcaatcgaaaacgcagagcatacgctttttacaccttatatgttggaaacgctctcttccctaggcgtgaaagacagcattgtcgatttaattcataaagggactgaattagaagactttgcggcatttaatttatcaattgaagacacagttacagtctgtttacaaagaactgaagaactattaaaacaatacaaaaatgtggaattcaatgacaaaatattaatcaattggcgtattatacaagagaaatagacatataaaagtcgaatgtaactacgtgagtattgattttattctttgtaaattacaagcatttcatattataaagtttgaaaagaggtatattgaaatggagaaaaatgaatatatagctaaatataatgaatatagtcaattattagacgctacatactcgcaagctgtagcataccttttaagtaaatatggcgctgtaaccgatgattattataaagaaaaatcatacacgcgatttttaaatggagaaatcaaaagtatttcaaaaggaaaatacactagagctagcgaaggattatattgccatcatataagcgaggacaaattccaaaatctatctgatctaagattcatttccaaatttaagtactcatacgacgttcaaaagaaagaaaacttagtgtactgtgatctaatcgagcatttaattttacatgcaattattacaaaagaatcccatggccaatttggtgtagctggattatgtcaaatgatcaaaccaacagtcattgattggtacattggcgaatataatccaaaaccagcatggatgcaagccaccaaagcacgtgcctatttgcctggaatattagtagagaaattactcattaaaattgacgatatgttaaaaggaatagaaatataagatttccttgagtctagataaatgattaatgtagatttattttttgctgttgagattttgttatagatgtttaaacctgtaattaaatatattttataaaatagaccacgcatacctatctataaacggacaatgtttataaatgagtttgcatggtcttgaattgtattaaatttcttttggttttaataaatcgactagattttcacaatatttatcaaatatgtattcctaaattatacagccttaatccagcagctactttcgaaacttccaacttagttgatataaggttcaatagtttgtttcgttctttttcagataaaccagaacttaaattgatattattgacttcataaaaattatagactaatgcctctatttgctttttaggcataagtaagtcgactgaaaactgatttacgtcgctttcataaatcatttcatgtaaattctttagactattatcgttactatctctcattaagtctgtatttttaaataaataacggcccaattcacgagctattgaaaatcttgtattattaatcgagtgattattattaatatagattgttcttccacttaaataacccgaagtattaccctccattttaatatatctaacatttaaattaagttgaaataatagcttgtctatgtcaatagcaaagtgttcagaagtaataaaaagttgatccattttgtcctttataaatgcctgaaataatcgaactatttttgattctaaaatatcttcataatgaactttctcaataactttcaattgattccccaccctaactaaaaaaatcgaacctacatcatttaataaatttataactataggtgtaaacattattaaaataaaacccctctactactatatgtaacgaagggacatgatttcaaaataaaataccttttttataaatttattataatatttttcattatactatacaaccgaatctaatctaacgatcctgaaaagaaaaataacggcggttccgcttcatattcatttttgtccaagtgttctttttcaattatttgattgacggttttccaattttttacttcatgctcttttaaaaaatggctatgaaaaattctatccccatagatttcttcatagccaatgctaatttgtttcatgtcatttctttaaaattcctaaaaatatataaactaaaagcataagtaacacagcaaaaattgccgaatatataattattgaaaaagcattgctttgcattggaactaaataatttaaagtacaaaataataataatgctaaaattccaactttaagtgaatattttaatctatccataaaatcacccttactgatatccccatttttctcctgtcagaacgtattccccggctgcattctttttagtttttaattttatatatattcccttactagtatcaatattcgatgcagctatagatccaaggaaaccaccaacacctgcgccaactaaacctcctgttagtgcagaaataacgctaatagcccccgcacctaaagcagctattgtttttgtatatgcagaagaaagatataatgttgcagtatctttacctgtttctacatattgagttttacccgctctcaattggtcttcagctttatatttttttatttcttcttttgtaaatatatcttccagtttataaccttttttctcaagttcatcaaataaattttggttactcaaatatattacctttgcttgagaatggtctaacttatcttcagcatgagctacatctgaattataagataatgaaattggactaacaaataatacaccagcagctaataataaagatttttaattcgtttttcattagtttcttttagatgatttttgtatttagatttcgtataaacagaaactagattttttcatgatcgacctatcttttgtccagatacagtgagacccttgtcatttaaatgatttttaattcgtcttgtaccaaagacttttctattagaattaaaaatatttatgacggcatgttctatgtttgaatcatctttagtgattttattatcttttctttttatagaatcataataggtacttcttagtattatcaggactttacacattgctgatactgaatattgatgtgcattcttttgaatgacttctatttttgccccataatcagcgctacttgctttaaaatatcgttctccatttttaaatgttgaacttctttgcgtaatttaatcagctctttttcttcatccgataagttatcttggtgattgaatgtacccgtgttttgatgttgctttatccattttcctacattttataaccgccatttacaaacgtcgaaggtgtgaaatcatactcgcgtataatttcattcctaggcttaccatttttatataatctaaccatttgtaacttaaactctgaactaaatgatcttctttctcttgtcataataaaatcgcctactttcttaaattaacaatatctattctcatagaatttgtccaattaagtgtagacgattcaatctatcagctagaatcatataacttatcagaagcaagtgactgtgcttgtatatttgccgatgatataatagtagagtcgcctatctctcaggcgtcaatttagacgcagagaggaggtgtataaggtgatgcttattttcgttcacatcatagcaccagtcatcagtggctgtgccattgcgtttttttcttattggctaagtagacgcaatacaaaataggtgacatatagccgcaccaataaaaatcccctcactaccgcaaatagtgaggggattggtgtataagtaaatacttattttcgttgtcttaattatactgctaatttttctttttgtaaaatatgcaaggttttaaagagaaacatcaagaactaaaaaaggctctatgtcaaattggactgatgcgttcaatatccgaagttaagcaactaaacattgcttaacttcctttttactttttggagcgtaaagttttgaacataataatattcgattgcgcaaatgattgtaacttccataaccaaaagatgtacgtttaattaattttattttgttatttataccttctaaaggaccatttgataaattgtaataatcaatggttacactattaaaagtgtcacaaattcttatgaatctggcataaactttgaattaactaaataagtaagaaaacctcggcactttatcattttaatagtgtcgagatttttatagatactacaaatatttataacatagttaaactcatctaatgacttatatttttgtttcatcacaatatgaacaattatttattggacgtattttgctctttttttatttcagaaactgacttaggatttttattaaattttctacccaattcatctgtataagaaatatcggtatcaaattgaaaatcatcaacagatcttataccagctgtaaatgataactttttatcattatttatataaccactaatagaataaccatccattgggttttctttaaaattagcgaagcttatatttttataacctttcacattgtacttcatataaatcgttattctttctttttgttcatcataatatttcttttcgtcatatttcatcttcaaaaagattccgcctagaatcaatattaaaattataattacaatcataagatattttttattcaaaaaatcaatctccttttcattgtacttattgacgaacattttgaataaattaagcatattgagttttacgatgattgtataaacgttacaacccatatgattgttggttttaacattagtcaatttttctttcttataatcttaaatcatgatttggtttactttaacacttaaataattatatttttatccattctattcataacatttattcaattggacctgaaaagaaaaacaacggtggttccgcttcatatttgtcaatagcggtttaagattggcgtgttttaaatacttaatcactttcaaaatctttttagtcagtatgattcttctataatcttaaagattttcatattataatattacacattttttcgaaatcttatttaaacttatttactagtttccttgtggattgttggttgtgttttagaaattcacgtcacaagttcaatataaatattgtttttttactttttataaaagtttgagcggtggcataaatatatagataaatctaaaaattacgcctaatttttgacatgtcattcttaattattttcttattatatttgccatcgtcataaaaaacattgtaccaccattcttgtctatctcgaagagaaattttttctagatatattttccatccaatagacaattttttagtattaagaaagtttaataaactttcttttttaataagtaaacattcattatcaaattcgagtaatttagaattaatacatattgtttcaccaaatttagttttccatactccttcttccgtttgtattaatgaaaaataatctactatttctttacacggaatataaaaacttattgatttgtccttaacagaataatctaactcccaaaaatattcataaatagctggacataatttaccatctgattcagttaaatatccctctttataatttttataagcttcgctccaataatattcatataaatatatactatgtgctcgaggaatattaatacctctatcataattattttcataacctttgataatttcattactatcttctttattataaaaatatcccatcgctaagaaataacatgagtctctatcttcaaatggtatttctttctctctcttttcaaaattaaactttgagcttaaacatatatatctatgattgtctatatctatttctaaaaataattttgtttcatcaaaaactttggtattttttacccattcattcgattgatgcgaaggaagtggtgagggtactagtatttttgattctttatcaatttcaagtaatagtaaagtaggatcaatatctctaatataatcatcccatagtccagaatattgaacatcaggaaatttatctacaagtttagctaaaatttcatagtaagcaatccattgatattttttgctaattctttcaattgaattattaaagttatcataacgattaacccacatatcaaattcaccatgtaattttgcatcataacccatttcaaaaatcctcattaatgctatattacttaagtcttgatcacttttaaaaccctttacccagtttcgtacagcataaccaaatacatatctgccaaaatcgccatatgccccagttcctcttccatattccgttgtcattgagtttttaattttatcgatagaaaaatgtaaatggctatctaatttgttttttaaagattttatgtaatcgtctatatttaaattcgaatattcttttttataccaattacttttataaggtggcctaattttttctaaatttatattagatatatcttttgataaactaatatattcaattgtttgcctagcataatctctcattaaaatatgaggatataccatttctttatcaaatatttcttcataaatataattagcaatctctatatgtatttcacaaatgtcgattcgaagtgtcgcccctaaaacagaagcatataatctttcgactatatatggatcattgttattttcaaataattttaataaaccaataattttagttggaaatgttttgaataattttactaaagatttagtaccgagatctcttaatttattattagttgcagaaaatatccacgttaaaaaaatcatatatttttccgcagtttcttcatctaatttcttatagttactaaatagccaattaataatttcaaaaaccttttcattatttatagatatatattgagtccataaaaaatctctttttcctaaattgcattgtttcaataatttatgtaaagcccaaatatttaacggatggtttttttgaggcatttttattaataagacatctaaaaaattatttctaaatgcatcataaggaataacattatcggatatatagcatttagtatgtttacttatgctaccatcttttctccatactaaactatttataaaagaatatatcatgttataattgtttttaaactgtggaaatacttcaaatagctctatattaaattcatttgctaatttaataaaaagttcattaataagacctctattataagataaatcgtcttccttttgaaaataccttgtcactttttcatctgactgtaatttagttactaaatctcttttatcaacatttctatatttctctaaaaggtattctgataaaaagtaatctcccatacgctcatacgaaaaataaataatcatttcacctttatagccagtatttttaattaatatattttcatctattagcgcttctaaaaatctatttgacttttgaacatactctttagctatattattaacaacagtataggattcctcataatttagttgattaaattctgagtcgttcattaattcaactaatccttttattactttttgtacaacattaatatttttatcaaaatcaaatttatcttccttagataaattaatatttactgtcttaagaacatttgtaaatagctctgcaacacttatagtttggtcaaattccttaaatttatttacacagtactcacacattagttttaaaaataatggattgttgaattctggatttaatataggtaacttaggtagctctaatccataaaaatcacaaaaagatacaattggattatagttttcttccttactaaaaccttcatgctgaaatactacaatattgttatcttgtattgcgtttttgggtaatataacatcttcaaaaggggttctaatagaaaatattaaagctatattagaatacttctttatatggttgataaagctttgaaaataatttccccataaccttttaccttcaccttcattaagcgcatcaataataataaaagctcttttttttgtttctttggccttattacttattgaccttaaaaaattatcaacagaatttgtaacttctaaatcattaagtatttgatgccatggatcttcatttttagtaaaaaattgtcccaaaaacagataaataatatgattttcatctctaagttttttagatagatgcgctaaaaggtgtgattttcctatgccagcttcaccttgaactagcaaataaggataaaacaagcattctttacatgtttcttttaaatacgtttgatattttaataatactttttcgattttactcatataagtttgaagttctaatttttcattctcacttattttgtatatattacattcattatgttctgtcagaaaaatataagggtcaatattaatttcgtctatcaattcataaatttcacttaagtattttttcttttcttcaaactcttcttccagttccaaataattattgactgattgttctaaattagagaatatttttttgaaattcaaataaatattctttgcgtattttgatttcatcttatctaaaatatcattttcgatataaccttttaattcttttagatatgaaatattagtatatttaaaattattggtaatagaaataccttctataattttattattaatagtatcgacatcattattcgcagtatatcgtgaagctaaattcgatatattaaattctaatttttcattaataaattcttcttttaaatatgacaaagaatcttcaaataaaagcggagataattctttttttaataattcaatagcgtgatcttgcttatttatgtttaaattcaaaaactcttcgcataagtcttgagttaaaataatatcttttttactatcgaataatatattatgtggatttgaaaaattcttatttttaatattattattttgatttccaataaatataaactttaatcgataaccttcttccattttatttgttaaatactctttttttagagtgtcctctattttttgctttttacacgttgcggtaacttgaataataattttattcgtattatctataagatcaaatgctggtgcatttttttgttttttattatgattctcaagtgaatacccatatacaatatttaacaggtctctaaaaaaatattcggaatatatatgattatttaaaatatttatctttcctagttcttcaatcttagtattaagtctaattagtgtatcaagaaatttttcttgattcgttgatcgtttcaagttttaagtctccttttaaaatgaatatttcacttcttataactaatatttaaacaaaatgatcacataataatatttaatttacaatatgccactacagtgtcaacattttataaacactattcatttgaacatggtctaaaacgaataggacattgtaaatgattaaatagtctgtctctagttgatgtatatggtcatttgttatgcagataataattaatctaattaatttttacgttttagttacttggttgtgattgaggctttttgtatctagttgtaatattctccttttttagaatcataataggtacttcttgaaatttttagaactttgcacattgctgatactgaatattgatacgcattttgttgaaagacttcattttttgtctcaaaattagcactgcttgctttaaatcatcattttacattatcaatcgatgtttttctttgcgtaattttattaactctttttcatcacttgttaaaatgtcttgatgattgaatgactcagtattttggttttgttttatctaatttgagaaagttaatgatgttagatcatattctcgtataatttcgtttctaagcttaccattttcataaagtttaattattttaatttaaattatttactaaaagctcttcagtctcttgtcataataaaatcgcctaccctcttagtttaacaatgtctattctcatagaatttgtccaactaaatgtagacgattcactaaacttctaaaaaaataaaccccaaattataatagtctcaatattaatatattacaatttattcataggatttttatcatttcaattaataggttgttatcagggttaaataaacattttttgtaatagtccttttttacgttcttttaataactcaattctattcatttgattattcattttattgtctatagattttaacaatgcacttactttatcttgttcagtgagacaaggtattttaagatttatattgcataagttcgcatgagttaatttagctggtgcattacctgtgacaaatgctcgtagttctttaaaatttaaataataattcataaaaaacaaattatgatcattacttttaactacatgcgcatgattatttacccagtattgcccattagcaataaagctactcgtctcaaactgcccccattttgcaccatcttctcctattagtaatcgttcttcattattgaataaataatcttttacgtaatcaataattccagttgcaccatagtaagggtataaccccttttctcttaatgaagaagtaattggttttcttctattattttcaaagataaagatgtcttttatgaatttgttttcccactctggatattcttcaccattctcatctttgaatcgcaattcttgtgtgaagattttctgcatatagccttttttctgttgttgaagcaattcaagtttttgttcttctaattcaatttgtcggtcgagtttgctgaagaacttgcctattttttgctgttcttcaaatatagttggggtgaagatttttaaattagcaatttctttgaagtttagaccttctcgactacctccactttgtgcaaggaaaattttccttttaccttttcttgataatagatactgtccaaaaaaattataataatactcttttttcaatctaataatacatacatgttgatttaaattagcatgcgtttcaactatcgaattaatggctgttctacctattgatgctcctgtaatatttaaaagaacatcaccatagtacgttctactatttttcatctcatcatctatatctttactaatataaactaagtcattaagatttaatttaccatttctaatattttgactccttaaaaatggtatgcctttgtttgtatagttttcacttccacctttgggagtctttccactacctattttggtagtaagattccctaacttcttctcttcccattcgccttcaaatcctgggaatctcaattctggcacatttttcttttgtgtattactcatctttcaacaccccaagttctttcaggtatgcattgatttcttgctcaatttctgcgatttctttatcgatatttttcaaatcttgttggacttgatctaaatcaatcggtgcttcttcttcgaatgtatcgacatatctcggtatatttaggttgtaatcgttatcggcaatctcttgtagtgtcgcgctgtagctatatttatcaattgtttccttacgcttatatgtgtctataatacgttcgacttgggcatcgcttaaatgattttgattttttcctttttcaaaatcattggatgcatcgataaatagtacgttgtcgtcttgttggcgacattttttaaatactaaaatacatgttggaatacttgtcccatagaaaatattcgctggcaaaccaatcacagcttctaagtagttcttttcttcaattaaataacgacgaatgacaccttctgcagcacctcggaataatacaccatgtgggagtacaacggccatggtaccttcatcgtctaggtaatgtaccatgtgttgaataaaggcaaagtctgctttagacttaggcgcaagtttgccgtaaccactgaatcgttcgtcattttcaaactttgaatctgcagtccatttcgcactatacggtgggttcgcaataaccgcatcaaatgtattgcctaaaaaggctgggttttccaatgtgtcatcattacggatatcgaagttctcataacgcacatcatgtaataacatattcatgcgtgctaagttgtatgtagtattgttacgttcttgaccgaaataacgatacacttgtgtttctttaccaacacgtaacaacagtgaacctgaaccacatgttgggtcatacacgtgacgtaatttatctttaccgtctgtgacaatcttcgccagtatcttagatacttgttgtggtgtatagaactcgcctgcttttttacccgcmgtcgccgcaaagcgcccgattaggaattcatatgcatcacctaacatatcaatttccatgtcactgtgaacgaatggtaagtcgtcaagattaaccatgactttagagattaaagcagtacgttctttgacattgttacctagtcgcgttgaactcaaatccatatcgctgaacagcccgataaagtcattttcactttcttcacctaatgtagatgtttcaactttgcgaatcgccgtcgctagatgttctatatcgaaatcttgcgtttcaatttcacgaatcatcgcactgaataaatcttgtggctcaatgaagtaaccgacttgatcaattaattctgcttttaagtcttcacgatattcttcatctgcccatgcttcttgatacgtgatgtcttcacctgacaaggcatctgcatattcttgttcggctttttcagataagaagcgatagaaaatcaagcctaaaatgtaattacggaattcactcgcatccatgttccctcttaaatcattcgcaatcgaccataattttttatgtaattcagcttgttgctgacgttgtttttcagtaatagacatgtgattcctccgcctttgcataagtaatttatctctttgtgtaatagatttattataacatttggttatgttgcgatgttgataatttggatgttggtggtggaaattttgagttttagtggcgcaattgttattgaaaaattttatagaaatgttgtagctttcaaatgctttcaaaatcatttatattcttaatgatgtcaaaaagttgttcattcatacataaataaaaccaatcaacaattgagttggtgaaaatcaatcgttgattggctttgatgcatattaaataatgcaatatatattaataaatgttagttatagtatattttgtcaggattgggtgaatgtctaagttttaattatttatctaaattatctgcaatgaatttcttaatttcaggagagaaataaacagcaaatcctcttgtgctttcacctgatggcttattaccggcatagattacaccaatagcttcgtgtttactatttaatataggtgaaccagagctaccaggctgaataattgcatccgatgacactatattcccattcactgataatactttaccagttgattcatacatttgtagtttatttccattaggatttggataaccaatgactgatataggttcattttctttagcttctgatgctatattaaatttactagtgaaatctttgaattttctaccttttggttgtgttgatttttcttcaacttgtacaaccgcaatatcttctttaccaggataatctacaatcttagtaactttataaagtccaccaccgttattataaaaaccattaggatgtgctttgatttcatcaccgactttcatgtgataggtaacatgtttattggtaatgattgtatgatttccaactacaaatcctgttccagcgcccatccatgtaacaccactgtatggtgcaacatttgtatttgtaatttgtttaacagtattttcggctttggctgtttgttgaataccttcaaccattgttgtgccgacaccagttattgatgttaaaatcgtcaatgctgcaatacttttgatgattatatttttattcatttttctgctcctctaagtatttgtataattataatgttagctttttgaagttttattttttttaatcatttcgaataaatggaatcacagagatgatttgaattgttgagtttgttgttaatttttaaaatcatttatctatgtaaggatttatttatctgtgttatctgcaatgaatttcttaatttcaggagagaaataaacaccatatccttttgtacttttatttccagggccgtttccaccaaagtgaacacctacaacttcgtatttactgttaaatacagctgaacctgagttgcctggttctacgaaagcatcagtaataatcatgttgcctttaactgacagcacttttcctgttgactcatacatttgaaatttatttatatatggttctggatagccaacaattgaaatgcgttcattttctttagcttctgatgctatttttaaaatgcctgtgtaatctttaaaattcctgttttttggatgaacagctttatcttccacatgtagaatggcaatatcttcttgacctgaataacggacaatttttttaactttataaaatccgccattattatattcaccattgggatgcgctataatatgtgcaccaatttccatacctgcaacgacatgcttgttggtaacaattgtatttttaccgacaatgaaacctgttccagatcctatcgaaacgacaccattgtatggtgctacattagtatttttgattagtttcacattatgttcggctttagccgtttgttgaataccctcaaccactgttgtgccgacgccagtcactgatgttaaaatcgtcaatgctgcaatacttttgatgattatatttttattcatttttgtgctcctctaagtattcgtataaatataaggttaggtttttgaagttttattttttaaatcatttcgaataaatagaatcacagagatgtttaaaattgttgattttgttgttaatttctaaaaatcatttatcaatgtatggatggatgatttatttatctaaattatctgcaataaatttcttaatttcaggagagaaataaacagcaaatgaccttgtactttcacctgttggtttatcactagcatacataacaccaattgcttctcgcttactatttaatataggtgaaccagagctgccaggttggacaaccgcatcagatgtcactatatttccattcactgatagtactttaccagttgattcatacatttgtagtttatttccattaggatttggataaccaatgactgatataggttcattttctttagcttctgatgctatattaaatttgctagtgaaatctttgaattttctaccttttggttgcgttgatttttcttcaacttgtacgaccgcaatatcttctttaccaggataatctacaatcttagtaactttataaagtccaccaccgttattataaaaaccattaggatgtgctttgatttcatcaccgactttcatgtgataagtaacatgtttattggtaatgattgtatgattcccaactacaaatcctgttccagcgcccatccatgtaacaccactgtatggtgcaacattcgtgttggtaattaatttcacactattttctgctttggctgtttgttgaataccatcaaccactgttgtgccgacaccagttattgatgttaaaatcgtcaatgccgcaatacttttgatgattatatttttattcatttttgtgctcctctgtttattcatgatgcttttgatatagacgtttttttatgttatattcgaccgatgtttttcattaaaattattgaacacatgctcatggtgtatatttaaatttgtttattgttcaatgtgcttttgaataaaatctttgatttgaggcgtaaagtatacggcaccattatattcagaaccaatttttccaataccgccatacaccacacctatgacctcattgttagaatttagaactggtgatcctgaattcccgggttcaatgtatgcatcaaaatttaaaatattgtctttgattctttttatagttcctgtagattcaaactgtttaaaactattttgagcaggtaatgggtaaccaataactttaattttgtcatcaactttagcatctttcgcaaaattgaatgcttggacattttcattaaaattaaagccttttggtccacgttcgactgcttgttcttcaatattcatgacagagatgtcttcatcacccggataatcagaaatgcttttaattttatatataccaccatttcctttgtcaccgtttggatgggcagtaattctatcgccaactttataatcttttgatacatgtttattggtgataattgtattttttccaattacaaaacctgtcgcatctttaaatgaaacgacgccattatatggaaaaatatttgtatctttaacttgcgtaacattcttctctgcatttgctatttgttgtgtctcttcaacgactgcagcatttattccagttactgaggttagaatggctaatgctgccatgcttttaatgactatatttttattcattttcaagctcctttacaattcgagatatgttgcaacgctcgtttaaagtcaatttgtttatttatctatgttttctgcaatgaattttttaatttctggtgtaaagtagacgccatatgcatttctgttatcatcattttttacatcagaagcaaaatgaataccaactaattcgttgttgctgtttaatacaggtgatccagagtttccgctttcagtatgcgctgaatatacaatactgctaccttctactgacatcacagggccagttgactcatataaaacatatttatttttgtatgggtgtggataaccaatcactttaattcgctcaccagctttagcccctgccgcatatttgaatggcgttacattatcattaaaattaaagccttttggtccacgttctattgcacgctcttcaacttgaatgactgatacatcttctttacctggataattaataatctttttaatcgaataaataccaccattacctttatcactatttggatgtgcagtaatacgatcgcccactttgtaatttttcgacacatgtttatttgttaaaatagtattctttccaactacaaatccagttgcacttttaaaagcaactacaccagtatatggaaaaatattagtatctttaacttttgtgacattattttctgctttggcagtttgttgtacttcctcaaccaatgttgttccaatacctgttacagatgttaaaattgttaatgctgctaaactcttgatgactacgtttttgttcattttaagttcctctcttttaattattttgatatctagatacataattcagtatatttagttaattatgtaaccgttttcttaatcactctttaaaaaatcaacttcacgaatgaattgatgatacttatttttcaatattattttgaataaattcttttaattgtggtgtgaaataaacaccgaaattcttttcagattcatcttttccactacctgcatataaaataccaatcagttcatgtttagaattcaatacaggagatcctgaattacctggttgtgcatacgcatcaaattccataaacgttccactgatatggttaatcgttcctgtcgattcaaacattttatattttgtttgtgcaccctttggataaccaataacagaaattctatctttcacttttgctccgtctgcaaattttgtataactaacgttcttattaaaattcaaaccttctgtacttgtttcatgaacatgaactatcgcaaggtcttcttttccgggatattctacaatgtctttaacgtcgtagtttcctccgcctttacctttactcgaatgatgtgctgatactctatttttaaaaatatcattacttttagcgatatgtttgttagttacgattgtatttttaccaacaactacaccagtaccacccacaaatgctaccactgaattgtatggttccttagttgcatcggtaatttctttgacattcttttctgctttggcaattgaatgaggctgattagaaatattttcagcaaaaccaagagatgttaaaatagttaaagcagttaaacctttaaccattacatttttattcatattttacctccttccaaatttatttttatagttaatgtatctagatacacatttactatatacattttaaataaaaatattaattaaatattaattaaccaattattaacgttttattaaattattttacatgaattgactcatttatttaaatatgcttaaaactcaatatcacgcaattaaaattgactttttaggattattttggtcttaaatattaattattgaattaaaattgtaatatttattcggaaattaggtgattgaaaatatatggcggaatggtgaacaattcatgtatttataatctttcactttactatgtattgtgtttaacaacattattagcgattagttcccctattatttatgacaatatgcagtcaatcaatgaaacatgtatgtatgagtatatttggaactagtaatgtattgttaaatattgaagatgattgaattatggaatttttttcgagatatgttatttcggggatcagattttgcgattttgccttggatagagtagttgcgatttgtaaatacgtttttcaggttcgattcaatttcgttgttaagataatatggattagtttcactgacatgttgatgcatgtcttttttgttctgataaagtataaaatgtttacttaacattacttagtatgacacctgctaattcaaacattatttgagacattcttttcaaattaattataaatttttacctatagactagtttgatatttatctacatctcaaaattctcatcaacaatctttcacatccaacatttttactttagtttttataattcaaaacaacaaaactatgttaaaaaattattctattttttagttaatagatagttaatacatttttgatatttagttaattgttcttttaaaaaattattattatattttcattgtaaacgtttacaatataaaaaaaggagcaataaaaatgaatacaaaatttttaggtaaaacattagtagcaagtgctttagtattaacaacattaggaacaggcttacattcttcatacttaggattagatacaaataaagttgttaaaacggctaaagcagaagaaaaaatgacagatggtcaattatggaaaaaagttaaagattcattacatgattctgatattattttaagtaacgagtacgaaacaatcaacgttacttatttattaagcaatggatattctagcagcgtttctgctcctggaaatgatgatggaggccatctaacacaatctatagactttaaaggattaaaacaaattgatttaactaaggaaaatgtctacgatgactttaacaaaaagctagatgctaaaaatacatggaattctctaaccgagaagttaaaaggtcttggtttactacaaaatggccaaaaagtatctatttattcttcagatagctcttctccagtctcgggtaaagtgggagaaggagtaactagtggtggcgaaaatactctaactaaacgcttcatcaagaaaatcacaattgattaaaccttaaactcaaatttccttaattcataaaacattaataactaaccctttcttacaaaccacctagcccataatatattaaaacgtcatttttatttcaattagcggaaaataaaaaaaccattccgcattaactttggcaagttggaatggttaaaaaaatattttagaagccagcgtttggcttgcttagacgacatgttcgcgcatgtcgtcttatttttacatttatataataacacgcaattcaataaaatgtctaatcaataaacctcaattacattcaaattcaaaaacttttcacctaatattcatcgcttaaataaacattacgtttaattaaacagacattgtcaatcgcgtctaatacccctgctgtccgaaaacaaaattattttgtattcatatttaactgttctctttcctcccttttcaacgcaactaaatttcttttaccgttagagccccaatctttaatctttaattgttctaccgctccatttattaaatcctttaaagagtaaaactgctaatagcaacgtgataataatatagattgccaatgttaatgtaactggtatactcccttcgataaacatataaacgtaacgtgtagcatatgtgattggtaaatagaaccacgaatgatctccaagcacttctaatccaaaataaacgttaaaaataaacattaaaactccgacaacaatagccattacatctttaatgaaaatactaaaaataaaaagtagcagtaatataattacattgaaaaacaatgatacgcctataaacataagtgttattttcatatcatgtgaatgccacaataaattaattgatgctaatagaatacatatggctgtaatagtataagtaaaaatcattgatgcatttaaccaatttagcctattagcttttcctaaaatatgattaaagtgaccaatattttcttcaaaattgataacttgatagacgtttatagaaattaatagcgatgtaattgcattaaaactcgctgtaaacaaacttatttgtcgaccattccataaatttacgtttaaataccaatttataaataatataaacaatatggttacaataatgggtacaaatgtgagcgcttgcttagaaaatttcaacttacatgactttaattcgttaattatcattttaatcgccaacttttcttattatttaaaaatgttactatcgcgaaaataatgatgctaacaataatcgaaatatataaggcattgagatcattaaagtattttgaattatggtttacaactaaaccattaggtagtataccaagcgtaataagcgggattctctgcattatcccccacggcaacacccaaaataaactcttcaatgttaaaaacaagacacaaatgactgataatactaagtttattaatattgatacgaacacaccaaagtatcgagttaataaaaagttgagcggtatcaatggtagagatactacatacatcaacaatattgtcaccaataacaacatagcattaaccggatgtggattaataattaggtcacctatataagcaataataaatactaaaaagcaatgtaccaaaaatgctattgataaaatgaaaatctttgctcttatttcttttgtaatcgaccaattattacttaagtaataattaaatgatttatttctcatttcaattttaaataacgaattacaagccatacataatacaatcgggatgaaagcaattggccaaatattaaatagtaaagttatatatggtgacacactattcgctgttcccgtattacttttggcgaataagactgtgaaaatagcaaaacaaagaaataccagcggacttattaataaaacatacatactgaaagaatttttaaatttgataccttctatctttaaatgtatcatttgtaatcacctttcgttattttgaagaatatctcttctaagttttcatctttgttatttctttgctgatattttagctcaccctcatgaataataccgatatgatctgctaaaacttggatttcagataaaatgtgacttgaaataataatactagtaccttgttctgttaataattttagaagttctctaagttcttggattccatatgggtctaaaccattagatggttcgtctaatactaaaatttctggctttttaattaatgccattgcaattccaagtctttgtttcatacctaaagaaaagtccttaacctttttctttttatcgacatttaaattgactaagcttaaaacactattaatttcgctgaaatcaacgctttcatttaaacacacaattttcaaattatcttgtgcacttaaatgattatatgtcgcaggtgtttcaataagcgaaccaactttgtgcaaatcatttcgtgtcattggtctattatctaatttaatttcccctgaatcttgttgaagtatgccacatataattttcataagtgtcgttttaccggctccattaataccaagtaatccataaacttcgttattttctaaagtgatattaatatgctttaatacatcttgatttttaaaccgcttcgaaatgttttcagtaactaattttgccataatcaaaaactcctttgatttattaacttgctttttgatttgctacatttaatgctttatacacatcaagctcaccatgcccatatctactaaatggtttattattcttagatgtcccatgctgatataacaattcaatcgctttatctggatgtttttcaagatgatatttatcaatgattaaagctagtgctcccgaaactttaggtgtggctaatgaagttccagcttgataaatatatcttccgttattggcagtagttaaaatgttctccttatgcatatacccttcattcatccatttatccacaccgaattgatttaaataagcaaatgatcctccgggcgcagcaatatctgtataattcataccaaaattggaaaactcagatagattactcttttgatctgtagatcctactgtaacgacattgtccatagatgcaggaacatctttcacttcgccattaccttgatattcacgctgtaattttagtttctgtttgtcattgacatcaataccatcattaccagctgcagcaacaacgatagattttttcttcttggcgtaattgattgctttctgtaacgcatcgtattctactttttcatcttttctaaatgtttgatggtcatttttgtccaaaataatataactaccaacactaatattaatgacttgatttccatcatttgcagcttgaacaatcgcttttgatacccaaagcagttctgtttttttactaccaaacacgcgatacattgtaaatttgttattcggtgcaacacctattaacttaccattagcactcgtttgacccgacaccatcgtgccatgtcctttcctatcattgacatcgtgaacatcacctgtttcctccggttcagtacctctaaaaccgtttaaaggtactaaatttttagaatcagtcgagaaattatttttcaaatcgtcatggtttttcatcacacctgtatctatgattgctattttggtgttagcatgttttggcaaatcatcatacgatgcaccattattggttattttattcatatcccattgtcttgaaaataatgactcatttgatgttctgtctattgttttctcgctagtaatacaagttgaacatgtggcattgatatatttaatatcatttttatagtttgctaaagcattagcatgcattttcgtcattttaatctgtgccacatgtaattccggtatattatagacaacgtttaaggacttctttttaactaacttgttaaatgttgctgtatttttgtattcaacactgtaatatagttcttctgacgctgatgcattactcattgtaatagatattaaaagactcaatattattaaactaataatagcgcgctttatgattttcatattctaatctcaaatgaattccagaactttatatggttcaggtgcgacaacattctttttaaatgtttttgacgctaattcataactttctgaaatatttgctggatatattgatacaccataatcttttaataatcgaatattattttgagtaactggattttcccacattcgtaaattcatatttggaaatatagaaagtttttcaaaagctgtatgacaaatagttaataataaattgtcacatataccatttgcaattttattaatcgtattagaagtcgcaggtaaaataataatcttgtcatgtttatttgctatatctacatgatttaaaaaagggtcttcaaattcgtcataatagttatcgcaaaattgctttaatatttcaccattaataaactttctaccgtttgttgacgcgattacatttacttcatcaaattttgattttaattcaataatatagtggctaatattgatactattaactgagccacacaaacaaatcaatacattttctcccatgatatacgcctccattcagctaattaaaaacgcattggtccaatttttttcattgagaatttttgtatttttcagtgtcatcaatgttagatagacccctaattcaccttctaaaaggccaactttcctacttttaaatacatcttgcttattttcattaatgtctataaaattcaccagataatcttccttataatgagaaatcagtttatttattaatacagtgatataatcagacacttcatttaattcaaaattcaaattcataattgttaacattaatatttgtgatgacaatccatgacaaatagttggacttattaaattttcatctttatcatttactacttgtagcatcacttttttagacattttaattatttcatcatcttgtaatgcttggccgattaaaaacaacgtcgtcattacacccgtattgccataacaccaaccattccgaataaaattgaaatgattacgttcagaaattaaatcgtaacgctgcaaccatctttcgtggttacaaaatttttcgtccatgataaatttgtacatgtcttttaatatgtgctgatgattttcaatcgtaattcctttaatctcgcataatgcaaataaagacatcggtcctagcactccatgtgcaaggccaagattgatattaccttcagtaaaataatttttatcagactctaaaaattgactttcttgtgggactacccagctatttttagaatattgaatatctttaaagtatactaatatgctttttaatgctttaacattaaattcattctcatctactctatttagcaaatatctccctatcccagctaatccactgacagtatcataatttaatggatttaatggttcttgtaatatttgatcaaatttattttctatttcatttacaatgtgaccatcaatattatttaaaatattttgataatttttgccattttgcgatgctaaatccattgaaaatgcaatacctgaaagtccaccaaacaaagaattgttatattgaccactctgtaaatatggtgctaatttcatgatgtacttatgcacaatttgctcagtattaatatcgaaaactttttgataagcatctaaaaacaaaatgatacctggtataccatgtgataaagttgaaggttcaaaataatcggtttcagtagatgcttttgaaatgaaatcatctacttctgaaatctcttgaaacttcttcttcaatattagattcatatcaatcatttttgtcaccacaccaatgcttttgagttttaacaatttcttttacaatagataaaacaaatgtttcttgatccttatcaatgccaaatattcgattgcagcgcatatgaattaagctgccaataatccttgaccttttagtagttaaagtttttttaagcccttcatttaatttgctcaaaatttggttgccatcttttaaaattcgataaataccactatagtgtttagccatatattcaaaattattagcaggattacatatagttacaagttcatttttaaaaggtctaatatctttacttttaaatgatgtaggtacatagttattaacaatttccatacgctcttcattagaaattgaaaacatctcaaataaatacattattgaaatagcaacaatatatggtcgatcaaacttaaaatcattttcaataatattgacagctaaattcgtgtcatattcaaagaaggcttctatttcattaatcgtgttctttccaccatatctaaaaaattctggctcgtatgatacaaattcataatctgaaacttctgtcgtttgtcgaacatgtggtaaccaattcttcaagatgctgtatatttctgcgtaattttcgtcattcctgaataacctcaactttaaaatgtcaccttgtttgatataacgcattaaaaaatattgatctatatctcccttatctttaagatgttttacaaatggatacaaattgtcgatgataaatgtatcttgcgatggcttatcgatatgaatatgtaatgcaaaccagtctttgtcatattcaatatctgtatttttatattttggaatttcgatttcgggtcctcgataagatgattttttataaattggtgtaacaatttcatacacatgatcattctttgattgaggtaaaaatgattctactaaacgtacacgtttatgcttcttatattctttcatcaataaatatctatgattagctaatgataaatttagtagaagcttgttatctccataaactaaattcacgatattaggtatattgaattgttcttgatatttcaaaaattgttgatcccattcttcatttttaggtaaaggtaataccatctcgttaattttccaatatgctggtttaagaatgacatttttatatctgattcgtggtgaataactaaatgaatcaatactcacatcattcataggttcaatgcatttcacagattccattgaaatttctcgtaacaatcgatataaattacattcttttaaaaagttatacatattgtttgattcaaatagtacccttttatttagttggctagaatataaatataatttgttaaaggtagcaccaacataaatatcatctaaggtaagctcatactttgaataactattactacttcctaaattcaatgaatattcgtatgagtcatgattagttaatacattatgatttctcggatatttcggtatgttatttatagaaatcatttctacattgtcatcacatatcatcttctgataataatgtcctttttcatgttctaattttgctaaagtttcagtatcaattaaatgatgaaatcgcccaaatgtagcgccagcattaaaagacgccgttaaaggactaataacaatgagctcattgtactgattgtaaaaacgtcctaaataaagttcagcataaacatctgcactcattggcgcatgataatgattgatttcattatcgttaatcaatgactctacatctttttcatttatgactatctcatcgttatttctcaaggcatgtaaaaatttttgcttaagcattacaatattatttccatcggtttcttcttcttgaaaaattgttgtcccgaaacctgttatatctgaaatcaaatctttaatattcacgagttgttcaaatccatacttttcaataaaacggttgtgaagaactttcaaatctgtgaatccaatattatttcttgataaaagccacaataagtacgctgcttcagatatatttgttgctatatcttgatgtaaataattgttaatcatgtcaattttggtatcaatttgaagatagtttttacatttgaatagtgccttcatatgatgaataatgtctttatataattcctcgccaaatccaatttcagttttttcataagctaatatcaatttctggatttctctaatttttttcacaaaatcatcattatgtaaagaaagtttatttaaaatataatttaaattatcgctatatgataacggtggtctgattgttgaatatataatttcctttgagacaagattatggatatatactttcactttagtaatatcattaatttcaaattcttgatttatcttttcagctaaatttgaaaaagtaatattattattcgtcacagtggttttgatgaatacgagtaattcgctatttttaatggaaaaagatgtatctttattgttgtttaaataaatagcactttgttcatttaaatatattcgatcattgataatatgtgctttactattccaaataactttcaaattttgataatattcatcaatactctcaatataactaaccagtttatacaaccattcgccatcgactttcacatatttttgaatactatttccaactttaagacgtgttggttcatttacaaaatgccccaaattaataccacttaataatccaaatggagttggacgtgttgacattctaattaaatattttaataaactttctttagcatctctaaccttcttgttatcgccatcaaaatttatttcttgtaaagtacaatataagttaaatgttgttgttaggattgattctttcatctgagcatttaattgtaagtcgctatatttaatttgttcagtatttaaaaataaattgaaaaattcaactgataataaaggtgttctaatcatacaaatacttgacggttcgtaaatagtgttcatttgtaagcacctcacatatttgaatagacaaatagagccctttcaggctctatttgctgtaatcttaacagcagaagctattaaaactaccagtcttagcacaaccaggagtacataaactatgacttgtaatacgttcgtcacctgctgaatcatttgagttattgtttgctttaacttgcacgtctaaatcaagaactttttccatagataaaacctcctattattagttgaagttaaggcctacttcaattgtcatattatcccttttcacacaacaaatcaataaattatataattatattttgtgaattttttgtaaacacttattaatttagtaatactattttgataattagatttttgtgtttttttattactatttattttcactaataattttgcatctaagttcataattttaaatttattgatgaattttttaatagattaatcaattcatttatacaaatacttagatatttttatctatcaatactattacgaatttggagatggctgcttgagattaattaatagatatttatgcagttttgttctatttatacaaaatttagcaaataataattgaagttattttaaagatgaggatataaacatataatttcaatgacttgattattttcttaaatgacatgttctaagagggtcaatataataaccaaagcttgtcattacttatatgtaaagatagaggctaattacataatcctaacttatttaacaggaagtcatgaaaactatattacaactaaaagtataactttccatcaccaaagtcagaatttattgaaacactcaactgataatatagaaggctaattataaaaatacctggcgattaataaactgtttccgttttttagcacttaatatatttaaaaagacaaatagagccctttcaggctctatttgctgtatccttaacaacagaagctgttaaaactacccgtcttttcacaaccaaagctacaaaaaagatggctagttattctttcgtcacccgctgaatcattagtgttgttatttcctttaacttgcacgtctaaatcaagaactttttccaaagataaaaccccctatttaaaagttgaagttaagacccacttcaattgtcatattaatcattaccacacaataaatcaatgaatttaataataattatttgttattaatttgtaaatcgtcattaattttatggtactattgttagtttaaacaaataatgtaacttctttttttaatatgttgtgaatattttttgtttaactcttaaatttcgggtttaacttcctctatttctaacagttatactccaggattagtttctttagaatccgtaccgattaatttaacagtatggttttgccagtcaacttcataagtagatgtaaacgttactgtattttgatttttgtagttattaccaaccaagtgtagtcgattccattgattagtatatctatccatttctctttggtaagttactttgattttagatttttttgtatcattttgtttatgagaaagtacgcttataaattctgggttaaagttaccacgcgccaataaaggcatttgatgtgttggcaagaaattttgaccagcatttgaactactttgtctaccgcctaaaaacagttcattaccatatgttgggtcataactatctctaccatatggtccccaaccattattcataattttgtgcgcctcaacaccccagccaattgatttatgatttgtttttctatcaatcgtagttctgtaactttcttgtttataatttatcgtttctgaaaatgattttgatccatttaatccacctgataagccattagatatattaatatctccgccataagaataacctaatgtttgttgaacttggaattcttcattttgatttttaggtgcatagtcaacaacatttacagcatcatttgattctgaactaaccgaaacattatacttaccgccccaataaaactgtgagtaattgtaatcttttggattaggctttttataacctgaattaatgtttccggctgccttaagtactaacgtatctttgtcataacttttatccttaatgaaattaaacgttaaaatttgagaaatattcaatttatcattatcagatgttgctgttgttttgtataaagtgattttgtcatctacttttttctcgcttacaggtgtgatatgttgagctgcatcaactgtattcgatagcaaaagcagtgcaattgatgaagcaactgatgatttgactaattttttcattttcatattaattatgtcctttcactttaatttcgtgtgttttccaattaacttcatatctaactacaaagtttctatttacaaatgcattatgctttctttctgcgtaaataccagttctagggaataaagtcgcatatgtaatatctaagtttctaccatatgaaatttcaaattcactcgtatcacttgaacctttttcatgtgatagtgtagtgataaacgatggattaaagccactttgaactaaaggtggcaattgattatcaggagcaaaatattctcttgctgaacctgttggaccatttggactttgtacgaataaatatctatcatgcgcagatttttttccatcaggcgtaacaaattcgtttgctttaacaccccatttaacagattttgagttttgcttgtctacttcactgacataactcttttgggtataactaattgttttagaataattaaatgagccattgccacctatagatggtgctgactggaaattacctccaatgttatatcctaatgtttgaccaacatcagtagtttctattttgtttttaggaaggtaattgattaagctaacatttggatctttagtcgtcagtcctatattatattggaatggccaaatcattcgtttagttaattcatatccactacccttcacatctgaaaatgaagttctggaattaataaaaccttgcattttaacaattaaagcgtctttgttatattttttatcttttacaaagtcgaattggacattttgagtaacgccccatttcttactacttacatcctccgtacgtttgattacttcagcaccatcaccaatattttcaatattagtatttgctctagattcttgaatcggagatgctaaaggtgcaatcagtcctactgacaaagttgcagctaacatttttttcttaaacataagtttcactttctttctatataaatttttaatacaaatttattctagattatttcacttatttataaaattaactgttcattaaaaaataaaatgctataaaatattaaaaatgacacaatttattcatttatgctgctgaaaaccggtcattttggcgcaaccttcattacctttaaatagttccctttatattcgaacaatatgataaaattaccgatactcaatcttttctctgtaaaaataaaaacgaactttaatcaaatcttcaaaaataatgtttgtattatcacaaataatctataattgaatttaaaattaactgattattaactattgtccgttaaacgaagatgattacttcgtatactgttataactgaaatgttctatatatcatttcgtaatatcgcttacttcatctaaaaaaatttaatgctatgatttagtctaattaaaaacatatatatatttactatgaactaaaatttcactttaaaaataaaaaaccatgatttcgaagtcttcataaactgaagcttctactctcatggcaatttatactatgatattcaattataatgcctagtctcatagtaaacggctactacattcgcatgtacttcgttttactgtccacgcatggtcgttgacttatttatattataatataaatattttatttttcaatacttaattttaaaaatcccctatgaaaatgttgatgagctacatctttaaatctttttatacattgtataaaattatattgcgaggtagtaaattgatattatacacttttggttgtgtatgcatctcacctatcttttttgcttttttcaaataagaaagtattaaaaattaatgcctatacaggaacagacatggctaaacttgatttaaatagtcttgacgacgagcacgtaaaattattaataaatgaattaaaatatccagaaactcatatcgatgtaaatgaattaaaaacaatagttgctagtcgaataaatgaaaggcaagaaataataagttttaagttaggaataaagtacttattaacaataaaaagagggaacatagaaaaagataggttttcaatttcaatcattttcaaagatacctatcacaccctagttagaatagatattaacggtggtactcacgataatccagatggaacaatcgctccgaaaagtcatattcacatatataatgataagtatgataaaaaggataggtttgcttatgaaattaacttgaaagatttccccgacatctataacttgtataatgtgtatatgtcgtttttagagtataataatataaaagaccttgaataaaggagggataatatgactacatttgatgctaaaaaattaaaaaaagaatatcttgattggtataatcagaccttagagttttctaatttatcaaacaatgtagtaagaatagatactccttttaaagataattctttagataatttaataatttacgctttatacgatcagtccagagacatgattacactgacagatgacggctatactatatttgatttagaaaataatggtatttctttaaataaatcaaaaaaacgtaaaaagatttttgaagagcacctttcagcttacggtattaaatataacgataaaactcacgaaatttttgttcaaactaactttaaaaattttaataaatcgaaacataatttattacagtgccttatatttgttaatgatatgtacttactttctaatcctaagtcacagaacatatttacagaagatgttgcaaacaaattggatgaacataacatttattacggaagagatttacctattataggaagcagtggtgttgttcataatttcgacttttttattagcgctaagaaaaatcaaaaagaaaaatttatcaatgctatttctaaccctaataattctatgattattaagtcgaaaataacggatgctatgcaagcaaaaaaaaataaaaagacacaggcaaaatgagtttatttttattttaaatgactcaaaaaaagaaataaatgaacataataaaaatcttcttcatgaaaactatattagtacaatagattatagcgaattagatgaaaagataggtttattgatttaatatatatagacgtgataatatcaatgtttatattaaatgaaacgaatttgaaaatttcgaaacagcttaagatagcaaattgaatagccttattgataatgcagaatcgtctacacttagttgaacaaattctatgagaatagatattgttaaactatttgggtaggcgattttattttgacaagagtcagaagattatttagttcatagtttaagttacaaatggctaaactttatgaaaatggtatgactagaatcgaaattatactcgaatacgatttaacactctcaatcttctcgaactgaataaatactgggtcattcaatcatcaagacaacttaataagtgatgataaatgttcataccattttgcaaatataaccagatactctcaacaaaatgtagagttcaaaattaaaaatgtccctaattggcacattgctgtatgataataaattcaacttagatttcaacaatataactaatgatgcttatatttaccgcgatatcaaaccaaacagcccatccacaaacaaattagaatatatcatgttaataatagtaaatgatatatcttccaaagaccgcaaactgtagcagaacatgagaaccttgcgattttgaaatggtctaataaatcaaatatcattgaaactttaatcacataaattaacagtagtcacctgttcgcagttctataaattacaaatgcaataaaggctaaagtaaactaattactttagcctttattaataatttagtcgaatttattaaaaatcgactaactcctggttatgctacgctttactttataatccgcacgtagatgccgattgattatattataatattattattttattttttcaagcgtatatataatatttgattttctttaagtaacagctaaacattacatttcaaaacgattaggtcatgcagatgtacatacaacgcttaaaacatattcacatttgattaaagaatttgaagataatgaaactaaatttatagaaaaaaatctgaatgatttgttttgtgactaaacttcaaaatcttgtgactaaaattaggattattcatcaaaaattagtcacattgtggctaaaaaattttaaatggatataaataaataagaagtgtaaaaatgaggataatagctcaaatgcagatatatcaagggattgagtccaaaataaaaatagcgcttaaaatgggtaaaaccaatttaagcgcctttacggaaggtaagggattcgaacccttgagacgcttgtgacgcctacacactttccaggcgtgctccttcggccagctcggacaaccttcctcaacaataaatatgtaataaaaaaacagaagcgatatttcacttctgcttgtatgactcctacgggactcgaacccgtgttaccgccgtgaaagggcggtgtcttaaccgcttgaccaaggagccatggctccacaggtaggactcgaacctacgaccgatcggttaacagccgatagctctaccactgagctactgtggaataatagaaaataatggagcgggtgatgggaatcgaacccacaacatcagcttggaaggctgaggttttgccattaaactacacccgctaatgtaaacgattatggggcggctgaaggggatcgaaccctcgaatgtcggaaccacaatccgatgtgttaaccacttcaccacaaccgccatgaattaagaatggttcaggacagagtcgaactgccgacacatggagcttcaatccattgctctaccaactgagctactgaaccgtaatggtaataataatggcggtctcgacgggaatcgaacccgcgatctcctgcgtgacaggcaggcgtgttaaccgctacactacgagacctattaaattaaaaactatgtattgcgggaggcggatttgaaccaccgaccttcgggttatgagcccgacgagctaccgaactgctccatcccgcgctaatattattttgaattacctaattaatataccataatcaaaaacctaaagtcaagaactttttgaatttaatttaaatgttatctcttaaataattacttaaatatcgtagcaacatgttctctgttgaacacaaatattagtatattcatttttgtagtgtacgtcaacgacattttcaaagttttttgtgtaaaaaaacgcttcttattcccttttatcatataagtgtctaatagttgtcataaatagtgttaaagcatttaaaaaggtataggagttataaagtttacaacgcctataccttctgaaaaagaaattataaaagcttgttacaccgcatattctttcagtcagcgactaccaatataacattgtagccctaagacattgcttgacgcctcaattacaacaatttttcaaaatcagcagctacctactgacacaacataacacaacccatacactaactatcgtgtcatgtaatcttgcatccgatcttgcaacgctgtaaatgtttcgaagccatcctcttctaagaagtgccctccatcttccacgattcgcaagttcccctctaatgcattcattaaacgctgggtctctttatatgaaacgtatttgtcatttttagaactcaatccgtaaaaattgtcaactttctttttaatattatcgtaatcaatggttacattacttaaatcaatatctaaatctatattttctgcatcttctttaaagcccgctatactgaaaaagccttcaatcggctgatcaatcatttcaatatattttaaagctgtgattgaacctaaaccatgtgttacaaaatatgtatcctttttgcgtacattaatttgtttcgtcatagcttcaatccactgatccactgtcttcgcttcaggggattcaaaattaaataatgttacgtcatatccttctaaagttaagttatgctccaaccactgataccaatgatttctactatttccatgcatagaatgtacaataattacatctgtcatctcattctctcctttcaacttactacttcttttctatttttaaaaaatgactgattacctataattgtaaaataaaaacaccttaattagaaatgttatatcgcaaagtgacatttctaattaaagtgtattgtcatcatttcaatatcattcaaaaacagctaaacctttgtctctgcttcaatttcacaaaaataattcccgctgaaagtatctatatttacacattacttccaccattatataacttaaaaatgactatatttcatcaaacattatctaaaggcgtcgcacctacaccaacaccatccaacaattaacttacaactctgcgattacttcttcagcagcaactttaccttgcgtaatacaatcaggtagtccaaccgcttcaaaagatgcaccagttactctaagtcgtggatatgtttgtttaatatgtgcttgaatctgtctaatttgttgaatatgaccgacatggtactgtggcatacttttcggcaaacgattgacaattgtaaattcaggatcacctttaaatgtcatcatttgacttaaatctctacgtacaatcgatactaattcattatctgtatgatcatcaaccacagtatcacctggtttacctacatacgcacgaatcaaaaccttaccttccggtgtagtaaatggccattttttcgatgtccaagtacatgcggtaatgtctgtatcactcgttctcgcaattacgaagccagtaccatcatgggtattttcaatgtctttttcatcaaatgccaatacaacagttgcaacagtcgtactatccatcgttttaaagtaatcaaatgctggatcttgtccgaaccaatttaaaaacacttgatgtggtgtcgttactaatacgccatcatacacttcttctagttgatcattgtaaacaattttatattgtttttgagatgtaattatatcatccactgacgtattgtagcgtattgtcacacctttatttttaacatcttgttctaatgcttcaataaatgagcttaaaccatgcttaaattgtttgaattgtcctttcggtgcgccaggatataattgtctttgtttcagacgcttatttttctcatccttcataccttttatcagacttccgaatgcctcttctttttctttaaaattaggaaacgtactcatcaaacttaatttatcaatatcggtaccataaataccacccattaaaggctctattaaattctcaagtacctcattacctaatcttgctctgaaaaatgcaccaacagaaatgtcaccatcctgcatttgagtaggtttttttaataaatcaaaccctgctcttaatttaccaagtggcgatattaattttgtagtaacaaatggtttaatatctgttggaatacccataattgaaccacctggaatcggatataatttatttttcgcaaaaatatatgattgtccagtcgtatttgtaacaatatcttgttctaatccaatatctttcgctaattctgtcataatcgtttttctacctaaataagattcaggccctagttcaatcatataaccatctttacgatacgattgaatctttccccccggacgattcgatgcttcaaagatggttacatcaatattaggatcttgctgttttaaaaaatatgcacttgataaacctgttatccccgctcctataatagccactgatttagtcacaacgtttcacgcttctttcgtcattaaaatatagacttgatttcatcaacaattgcaccgataaataatggatgtgtattcggcatttttggacgataataattcgcaccaatatcatcgcaaactactttacattcataatcattgtcataaagcacctctaaatgctcacatacaaaacctactggcgtatatataaagtttttatactgatgtttttcatataaatcacgtgttaaatcttgtacatctggccctaaccaaggtgtacctgtattaccttcagattgccaaccaatcgcgatatgttcaatattagattgttctttaattaaaagcgcagtatgttctagttcttgtggatatggatcattattcttttcgattaaaccttttggcaaactatgtgccgaaacaactaataccgtgtctttatgttcctcttccggtatttgagctaatgtttcgttgactttattcgtccaatattcaataaatttaggttgttcataataatgtttcacatgtgtaagttgaataccatattttgcagcttcttcatcagcacgtttgtcatatgatcctactgaaaatgaagaataatgtggtgctagtactaccgtgattgcttcagtaatgccatcattgtgcatttgttcaaccgcatcttcgataaatggtgaaatgtgttttaatcctaagtatagtttaaattcaacatctgcatatgctttatttaatgctgaaactagcgcatcagcctggtcatctgttgtacctgctaatggtgataaaccacctataaattcatatctatctttcaaatcttgaagttcttcttcagatggacgtttaccatgtctaatatctgtataatatggctctatgtcactttctttataaggtgtgccataagccataactaataatcccatttttttagtcattgataataccttcctttaaatgaattatctttcatgtgcttcaatgtaaaactatgattatctttgtgtatatgtgtgtacgaattcgcttactttacgtaacgtctctggttgcacttctgggaatacaccgtgtcctaaattaaagatgtgtttaccgttctccataccttgatctaatattggtttcaatctctcttcaatgacattccatggtgctaataaaattgatggatctaaattcccttgtaatgttttagtaacgcctaattgttgagcctgattaatagacgttctccaatctaggcctaatacatcaatcggtaaatcattccattcattgattaaatgactggcacctacaccgaataaaattaccggcacatcatgtttttctttaacctcactgattaatcgaatcatatgtggtttaatgtaacgtctgtaatcctcgacatttaatgcacctacccatgaatcgaaaatttgaatcaattcggcacctgcttcgacttgagctgttacatatttaacagatacatcaactaaatgattcattaaagcaaaccatgttgcttcatctctatacatcatcgcttttgtaaaattgtaatttttcgatggtccgccttcaatcatatatgacgctaatgtaaatggtgccccagtaaatcctattagcggcacatttaacttttcttctgttaaaagtttaattgtatctaatacatatggtacatctcgttcggggtctatttgagaaagtttctcaacatcttgaattgttttgattggattatgaatcactggaccaatacccgatttaatttctacatcgacaccaattggctttaatggtgtcataatatctttgtataaaattgctgcatctgtatgataattatcaactggtaaatgtgttacataagcgcacaactccggctgatgtgtaatatcgaatagtgaatatttttctttcaattttcgatattctggttgcgaacggccagcttgtcgcataaaccaaacaggtgtatgtgatgtttcttcacctttgatcatttttaaaattgtattgtttttattatgcaccataaaggcctcctaaattaaaatcattcttatctatattatcatatcgctcattcgttcgtattttcaataaataaatgtcataaaactgacatttaatcatagaactatttattgtaaatttaaattctaaagtccattattttgtatcattacttctaaatatctcgcaagattcattatagtaattttaatcaattattaatagtggtaatgactagtttatcatcgtataataaataaaaacataagggggacctttcatatgaagaaactatatacatcttatggcacttatggatttttacatcagataaaaatcaataacccgacccatcaactattccaattttcagcatcagatacttcagttatttttgaagaaactgatggtgagactgttttaaaatcaccttcaatatatgaagttattaaagaaattggtgaattcagtgaacatcatttctattgtgcaatcttcattccatcaacagaagatcatgcatatcaacttgaaaagaaactgattagtgtagacgataatttcagaaactttggtggctttaaaagctatcgtttgttaagacctgctaaaggtacaacatacaaaatttatttcggatttgctgatcgacatgcatacgaagactttaagcaatctgatgcctttaatgaccatttttcaaaagacgcattaagtcattactttggttcaagcggacaacattcaagttattttgaaagatatctatacccaataaaagaatagattcgaagaaaacttccattggttatgctgttaacgtatagatgctaatgtaatctgaacgccgtatcatttggcgttcaacattacatgcacctttacaacatacatgccaatggaagttttttagtctcgtaataatgtttcctgatatttcaactttttaataatacttctaatcgttaataaacctacaatatagaaaatgagtacaacatagaataacgtcatatgttttataataaatgtcactgcaaacacagtacaaataacaaacattaatctatataaaaactgttcataccctttgattaccttctcttcaggtacaggccacacttgaggccataagccatatgcttgctgtgaataaaattgtgccatttgtaacaatataatatatacaaataaacacccaataattgctgtcactaatggatatgataaccaaaccattaataaaactgcaataattactaacctaaagataatattaaatgcgtctctccctcttataaagcttctaataaataagaataaatacatcgcattagagttaaatttactaccctttggaactggtaaaagtatatctagataacttcttctgactgcagattctttcaaatgttttacatcggtgaacatattaacaaatttataataattcatatgatgtcgatgttcgattgcaatcattttctcccaaggatacaaaaagcctggtttatattttttaactaaaaattctattaacacaggcaaagcaaccatcacaaatgcgatgtaccattttggagctaatagtaagtaatatgttagagcaaaggtgatgaatgatattaaattaacttgccatgttttaagtcccgattgataccattgccatcttaagcgtaaaccaacatatggaaaaattaatgcactgactccaaaacaaatataaaatgccacattatgttgattaatattgtaaaacaacgggaacattacaataacaataatgagttggattaatatgcgcgcaaagtaactatataaaatcgcatgacgcataaattgagacatgtgtttttcaaatggtaataaaaagattttatccgcttcttttaacagtggtcgcattggaaaaatagatgtcaacgcaacaatcactgctgctattaatgaaaaattgatattcgttggaatatgttttaaccattcaccatatccaaaaataaatgcacccagcaaaataagtaaaaagaccatgaaatgaccattaaatataaacttattataataatttttctctttacgaagggcatgtaatcttttattaaataatgtggtagcttggttacgcatgtacatctccaccttgcgtcacatgaatatatatatcgtctaatgtttgattatgtaagccagtttgttgtctcaatgcttctaaatctccaaatgcaacgacttcaccttcgtctagtatgataaaacgatcacagtaacgttcagctgttgctaaaatatgtgtactcattagaacggttctaccttcgtttttcttttcaaccattaaatctaacatggattgaattcctaatggatctaggccaaggaatggttcgtctataatatacaattcgggattaacgataaacgcacaaataatcatgactttttgtttcatccccttagaaaaatgactcggaaaaactttcaactcattttctaaacggaatgtctttaataatggcattgctcgattcatcgtttcatcacgatcaatatcatatgccattgctgtcatctcaatgtgttcctctaatgtgagttcttcataaataaccggtgattccggaatataagataactttcttctataagcctctatgtcatcattaatgttgatatctgaaattgatagagatccttccataggtgtaagcaatcctagcatatgtttaatcgttgtactcttaccagcgccattaaggccaataagtccaacaatttcgcctttgtttaattcaaaatttatatctttaattacagggcgttttccatatccacctgtaagctgttctactttaactgtcataaggcacctccatgacttatattgtaccaaaaattataaaatgctcatattaaatacacatgtcctaatatcgaatttttagcgacaatgttataatgaatggtaatactagttgaaaaggagtgtagtcatcatgtcagaaacaattttcggcaaaattttaactggagaaattcctagctttaaagtatatgaagacgattatgtctatgcctttttagatatatcacaagttactaaaggacatacgttattaattcctaaaaaagcttctgctaatatctttgaaactgatgaagaaacaatgaaacatatcggtgcagcattacctaaagtagcaaatgctattaagcgtgcatttaatcctgatggtttaaacattattcaaaataatggtgagtttgcagatcaatctgtatttcatattcatttccacttaattcctcgatacgaaaatgatattgatggatttggttataagtgggaaacacatgaagacattttagataacgatgcaaaacaacaaattgctgaacaaattcaagcacaattttaaatgtatgcttaatctaagctcgaacgggtataatatgattaatattataacaattgcgtttgaagtgataacatcaaggttagcaattttaaacaaaatgagttatcaagataacagatgttaaaagtgaggagaatataaatgaaagcatcacgcattctattcggtatcggtgttggcgtagcagctggttttgtagttgcacttcaaggacgtgacgacaaaagtgtcaagaacaacacgatcgatcgtactgcccctactggttcaaaatcagaactacaacgtgaatttgaaacgattaaacaaagttttaatgacattttaaactatggtgttcaaattaaaaacgaaagtgcggaatttggtagttcaattggtggtgaaattaagtcattacttggaaacttcaaatctgacattaatcctaatattgaacgtttacagtcacacatcgaaaatttacaaaatcgtggcgaggatattggaaacgaaatttctaagtagcaggttacgttctcgatcacaactatttttattagtaacagcatatttattttttaaaattaaatgccaaataaacgagatgacattagaaattagatatttcttgtcatctcttttttaaaactcaaatgaacttatgtttacaaattataggaagacattgtttgtagtgattttcgcttaaatcatatttatgaattgattgaaaacattgcttaggattcattgtgttatccttgcactttgattacgctttacttaaatcattatcgacaaacaacatacttatattttcattgagccgaaccttatatacacattacatataccttacttgcacaaattattaatctggtgtttattataattacatatcactatatttttagcatttgtataacttagttggtcaaaagatgcttttgcatatgccctgccatatccattttttatattattcaagttttcaaatactcatgtcacacgcgcctttttcataagtgatgctttattagcaagaatatgtgttcgcagaaatttgttctgcattctacttctacgctagtcaatcagacaattttaccaatccccactttcgcgtttcaaatcaaacaatacgtcgctcctttcttcttatataacaattcttctaacatgatatgttactattgaattactgaacctgagttagttataatctaacttatattgaaaagagatgaggcgtaagatatgtttttatgtaaaagacaaattgatatcaatgcacgatttggtttgcctagaattgcatttatgagtgcagttgcaaccatcattatgtttttagttagttatgaagtaatgtattttttatctaatacgccattatcagatagacattttctcatctttttattacttgtatttatgacgtatccattacataaaagtatacatttattatttttcttaccatatagaaaatcgtttaaagttcataagttaactaaaagaaaatggcttatattctataatacctacgtcaatcaacctgtacacaaattttatttttgcattaacttaatattgccgttaattatcttatctgcaatgttcgtttatctaacaatttcattcccgcaatatggacattattttatgttcttattggcattgaatttcggtatttccattacagatttattatatttaaaaataattatattttctaattatggacaatatatagaagaacatagtacaggtattaatattttgaaaaaaattaaaaatccatatcatttataacaaaataattatagcaaggtgttattatttgtttttaggctatgtaatagcttacaatcaaatgtatatagaccttgtttttttattttcatcaatttctacccctaaacctaatgctctagtctgatgtcatgggttattgattggtgataatataaaactatgttatattcacgatgattaacttacaaaggagtttcaactatgaagatgataaacaaattaatcgttccggtaacagctagtgctttattattaggcgcttgtggcgctagtgccacagactctaaagaaaatacattaatttcttctaaagctggagacgtaacagttgcagatacaatgaaaaaaatcggtaaagatcaaattgcaaatgcatcatttactgaaatgttaaataaaattttagctgataaatataaaaataaagttaatgataagaagattgacgaacaaattgaaaaaatgcaaaagcaatacggcggtaaagataaatttgaaaaggcccttcaacagcaaggtttaacagccgataaatataaagaaaatttacgtactgctgcttatcataaagaattactatcagataaaattaaaatctctgattctgaaattaaagaagacagcaagaaagcttcacacattttaattaaagttaaatctaagaaaagcgacaaagaaggcttagatgataaagaagcgaaacaaaaagctgaagaaattcaaaaagaagtttcaaaagatccaagtaaatttggtgaaatcgctaaaaaagaatcaatggatactggttcagctaaaaaagatggcgaattaggttatgttcttaaaggacaaactgataaagattttgaaaaagcactatttaagcttaaagatggtgaagtatcagaggttgttaaatcaagctttggatatcatattattaaagctgataaaccaacagactttaacagtgaaaaacaaagcctgaaagaaaaattagtcgatcagaaagtacaaaaaaatccaaaattattgactgatgcatacaaagatctattaaaagaatacgatgttgactttaaagatcgtgatattaaatcagttgtcgaagataaaatcttaaaccctgaaaaacttaaacaaggtggcgcacaaggcggacaatccggcatgagccaataacacaaaaccgagcgaccgtggttcaaaaatcataccacggccgctcggttttttcgcattaaaaatcggacagatgagctcatgtttcagtatactcatctgtccgatatcttttaattcttaatcgagtgattcaggattgtagaatctacgattttcaagaccaaatattttatctgtaaactgacccttgtcagtttttttatatgccttttcaaacatattcattctagcatcgatattatcgatatagcataaaatttctgcttcttttaagtatggcagttttggagaaccatactctaacttaccatgatgagataaaatcatatgtcttaacaacatgatttcttctccttcaatgttcaattcacgagctgcttcaactacttcatcactcgcaatcgagatgtgtcctaataagttaccttcgactgtatacgacgtcgcaacaggaccactcaattctctaactttaccaatatcatgcaaaataataccactatataacaaacttttgtttaacaatggataaatgtcacaaattgattttgcaatacgtaacatcgttaatacatgatagcttaagccactcgcaaagttatgatgatgagaactagcagctggatatgtgtaaaatcgttcttgatattttttcaataaatgacgtgtgatacgttgtaaattagcattttcaatatctagcaaataatgagaaatctcttcttgtatttctgccggtgataaaggtgcaccatctacaaattgttctgtttttaattgatcttcagttgtcgctagtctaatttggttgactttcatctgtttatttccgcgatagtttatgatgtcacctttaacatgtacaatttcttcaggcttgattgttgccatatcattttttgtagccgtccaaaatttcgcttcaatttcaccacttttatcttgcaaatgtaatgtcatataatctttaccttgtgctgttacaccctgtgtagctttatgcactaagaaaaagtgatcaactgaatctccgggatttagattctctatatttctcatcgtttcccgccttcctctattttgtttaatgtaatcacttcttttgatggaacaatattatcttttacacatgtaaagtatagtacttgatagtgttctgataatgatcgtaaataattcaacattttttcagtacgttttttatcaaaatgaacaaatgcatcatcaacaattaatgggaacggataatatggtcttagtaccttaattaaactgatacgtaaagctacataaagtaattcttttgtagattgacttagttcaacaggatcatataattgaccattaacatgtttaaccgtaattgaatcttcattatagttaatcatcgtatatctgccatctgttaaatgcttcaatatttctaccgcttcattaataacttgaggcaaacgtttatctttaatttgtttaatgtgttcatcaactaaactttgtaaataacttaaacttgcccaatcttttgcgatatcattaagttgatttttaagactgtgatattcatgtcttaaattagcaagcgttgtatcagtttccatgtgattgatttgtgcacttaaatcactgacttgtgcttgcatttcaagatattgctcattatattcgtcaacttgagtagccaataaatgatcttcttcttcaagttgtgcagttgttttttcacttaaactagaacttaattcataagaatagttttggttctcaagatatttagttaaatcattaaaacgactcaaattactagtataagtttggtaatcttcatgatgttggtaaaaatcttcttcagtaccaacattgataaaatcgaatagtgctgtaatttctttattattttcttctaattgagcatttaaatgatttaattcatttgtaacaagtttggtattttcagcattaatacgccatttttcattcgtgtcttcagctgatttcaaccattgttgcacatcgtggaataaagataatttgttgaaataaacaaattgtgattttgtaacagcttcagcatgattgtagaatgtatctaattcttgaaccaattgctggcgttgttgatttaaatcactgatatgttgatctaatgctttaatattcgccattgtagaaatactatcaacaattaaatcatttgaaattttagatgataagtataattcatccttaacgttctcaactgtcgattgtaattcatcatgacgccctttcgcatcatttaaacgaccttcaatatactgacgtttctcttctaaaatatctttatttttcaaagcttgttgccagtgatcacgaatgcgatattgctcatcaagatcaaaatctaagtcataattttcatctaaaatggctagttgtgctttaatttcttcgatttcatctgtgatggcctcgctataatctacttcttttgatttagacatgatgataccgataacaaatactaaagttaatactgcgaaaataataccaaacaacatgttgtttgaaataaatgagaaggcagttaaaccaatacctactaatgttaaaagaataaacgttgttcgtaacaatttttgacgtttttgtttttcttgttgctcaatttcgaaacgttctttcaatttgctatacaagttctctttttcgtttaattcaatgacttgttgtgagtattcttttttcttttcaaaagtctcttcaggaactattttttcttcaacagaatctagttcgctatgaaccgcattatcttcgattttattttcttctaaactacgttctaattgtttaatgtatgcagcttgttcttgtttattcttgatttgctcactgacataacttttcattgcctctgaactatctacgtcatgatgcgtttcagaccaaccaatatttgattgcaattcatctttatcacgttgtttattcgcaatatccttttcgattgcagtaagttcaaattctttatttttaatttcattttcttgttgattcaaactaatgaaggcgtcaatatcagattgtttaactggctctaattgagtcgcttcttctttaagttgagctaaacgctcatttcttaaaccaatatctctttctaacgattgcttatgcgctcgtgctttttcgtaacgatccacacctttttctgggaatgtgattggctcaatatttaactgttgttctagagacttccattcttgtgaatgatcatgtaaagcaacctctttttgtttttcttcatgcatttttgataattgatttaaattatgctttaaattctctaatcgacgtgatgatttatctcgatcatctactaagcgatgatatgtttctagctttgcttcttcttcacgaatttgactttctagttgttttaattgctcaatttgttgattaatgatcggatttttacctgattttttatataattcatcttttttacgattaatcacttcgcgcattgacgtgaattcagttgatcctaaagcccctgcttgtaataaataatcttgcaattgtttttcatttagatttctatgaatgtcttgaagccctagtacatcaaatgaaaagataccttgatatgtctttttagaaatataattaagtttcttttgtaaccaagcatcatcacgcacagcaccattaggtaaatatactttcacatcaccttgagcactgcctttaattcgttcaacttcaatctctaagccatcatcaagaataagtactaatttaccaccgtattggttacctagacgtggttctagtcttggctctttagactttttagttggaaatccaaataatatcgaatggatgaatgcttgaatcgtcgatttacccgcttcattttcaccaaaaatttcagtgaagtttttattaaattcaattttacgttgaacaaattgaccgtaaccataaatttcaagtgatttaattatcattttgttcacctctcatttcagcttttaatatttcttcagcacgattaactaatgctgtatggtcgaatgttccataatcgtctaggaacttagatgcccttggatttaaatataaatctgacatcgctttatcaaaaacagtttgatcgactaataattccgctgaaaattcattaactaaaggtgactcatcattttgtgcatattgtatttttaactcatcaatatatacaaattgattttcgttttcttcataatctgtaatcatttcttcaacttgtaataaatcttgaggtgaaattaatgtctcactattaataacaagcgttaaacgataaaaggcttttccttcttctctcacttgttctttaaagttttgaatgacctcgtataaaccttgcttagatgtcttatccgtttcaatagttgcttcttcaaatctaatatactgtgtaggataaaatttagtctttaattttaagtggtcaccctcgattaataagcaacctttttcaccttgctcattaaaatgtctaccttgaatattacctgaatagttaattacaggcatatcacttaattgttgacgttcatgtatatgacctaaagcccaataatgatacaatttactgtttaaatcttctaaaatgaactcggtatatctttcgttaactgaagatttactatacgtaccatgcaagacaccaatatgtatgcctttttggccttgacttgatggatattcatcaatcttgttctcataacttactctattttcataactaaatccgtgaatataaattgtttcaccagatttagtaattgcttcatacgtctcaactttatttgaaaatacagaaacattatctggccagtttgatgaaatctttgatgataaaggatcgtgattaccatgacaaacataaacaaagatttgttcattttgtaaacgttcaaattgctgttttaagaaaatttcagcacgtaatgttctgttttcactatcaaataaatcacccgcgataattacaaaatcaacatcttgttgtaatgcaatatctacaatatttttaaaactttcataagcacttttttgaacatcctcaaaaattttagggcttatatgactcttagatttgaaaggactatctaaatgtaaatccgaacaatgaataaatttaaccatacatccatatctccttaattaaaggttctaacatcaattttgcaaaatccaactatacaaagcattctaatcactatattcatacttataggtgtagtgattcattagctgatttattaaaaccagtcgccatttttatttcgttaaaaaactattatctacacaataataaagtgctttagtcaaatcgtgatgttttatttattaacaagtttattatttcttcattttaccataatacgcttcatatcgtcgatgaacatatgaaattgagacacatttataacagtttaaaattttatttgtagcgtacgttgatatttttcaaaaatttcagtcggaaatgcaatttccgtagttattaacaccgctagtgaatcaaatggcacattaaagatttacatgattactctactagatttgctcggcagtaatgaccaattagaaactaaatgtcaaaactatcattgcacttaatacgccaaacattttcaggccgttcttaatgagtcattaaaagtgaaacgcttttccatcagtccgatacatgaccgaactaatagtattatgttgaaaactttacacttcaaaatgcaaaaaggaagttaggacacgtttactagcctaacttccgttactgaatgcatctgcccaatttgacagagagcctctaacttccgttatcaaaactaaaaaaactacccacaaagtctcggactctgtcggcagtctattcctctatttaaaggattgaaaaatattattttaatattagtcagcgtaaatttcgtctaatggtttaacgataatttggttgatttcttggaatacttgactcattttttgttcagcattcattaatgcagagatgttttcatctttttcaattgcttgcgcttgttcttgcgctttttgtaaatcttcttcagcaatttcttcaccttgcatttgtttttgttggaagttaatttgagtttcacggaactcgtcgaataactttttagattcttcgttagcttttacattagcgaatgcttctttgattgctttgtattcttcgctttctcttaaagcttgttctaattgatttgcataatcatataaatttactgccatggttatagcactcctttgttgtgatgtttattaaaacgttcgatattactttaccacatctcgcttttttagacaaagattgcaaccaaaccttggaaaaatccaataataccacctaaaatgaaacctaatgacataatcaactttagttctttgttagcaatttctataattaatttttcaatataatctaagtcaaacgtattaatttgttcttcaattaatcctcgtaaatccacttttttcataattgtagataagtgaatcgataatttttcaatgattaaatttgctaatttgctagagagttgaccttctaaataatcaacgaattgaggcattaacgtaaccactggcttattcgcttgtttgcttgcatatgttgttacatacactgatagattttcagcgatttcattaaactgcgatgcatctaacagttcattcaatggtttatctttaaaagtttgatattcattggtaattaacgatgtcacaattgttcttgctttaggatgagatgttaaacgtataagttcttgttgaatgcgatctgcaatactctcttttgtcataaacatttgcaacataccaattaacttacctttctcattgaaaaaagtatccaacatatcattaatatcttgtgtgccttttgcagatgataaataattccttgcacgatcacataataagtctgttgcgttatctacatgctgatttaaaaatgttacaagttgatttggcaataaagatgctattgtttggttttgatgctttgtataataattattcaattgtgattcaatatattgatttccattagtttgtaatacttgttctaaatcaatatcgatttgagaagtaatttgttttattgacaattgatctttcgtcaacttttgtaactgctgttgaatcatagattctattgcttgctgtgattgctcgcttttcaatttttcattaattaaagtttctgtaagcaaatgctcttcaatcacttggccaattttagttgcaatttcttcgcgtcttttcggtattaaacctggtgtaaatgggactctaaatttaaatatatagtatggtttaaaggggtgaaacagcattctaattgcaattacattagtaatgccaccaattatcgcccctactacaatcataaatatgataataaatagtgcattcataattttgactcctttgtgacaacatagttattcattataccactatttttattttttaattcattaatcatttcactttctgctcaatttattattagtttacatacaaaaagcgatgcctcacctctcgaaacaggtgtgttacatcgcttttattatttattaaaagtatataggcctagatatgtactaattcttctttagcatttctgttaaagtatgtttcagcttctctcattttagaagtaccgaaaattggttggttatctggatttaatacacgataaatattgcttactttgttactttgtaaaatgtacccattacgagtctcaatgttattccaataaatatcacttgttggtgcatggtttggatatgcacagtgatttcttgaaattgtttgaacgatttctaatggatcacagccaaatgtactgtttaatacttcagagtctctgaataatgcacaaattgaaatacaagttgtccagtttggtaatactctctctttttcgatttgtactaaagtctttttagaaagtccaattgtttgcgccatagtatcttgcgtataaccagcctctatacgaaccattttaaattttgtttgaattaaatctgtaaaactctgtctatccattctgttatctacctttctgtttggggaattttatccggacacaagaaattgcaataatacacatttcttgaaacacagattacatcttaatatatttttaataaaatgaaaagagtcaatttcacatttgtattaaattttgatcaagtcaacaagagttaagtttactttataatgaagcgaaagtaaatgaagtaaaattttatgcataatcactagatttgataaaacttacacttttataatgatatcaaatttacaaagaaaactgtataataaaccctatcgctataaaaaattcatcaaaatcagattaaaaattgtctatttttcgacaaatatttaaaagctcattctaaatcaacttattttccattgcataaattgctgcttgtgtacgatcgctaacttgtaatttactaaatatatgactgacatgtgttttaattgttttttcagatacaaataaagtttctgcaatctctttatttgttttacctttaaccatttcacgtaacacttcaatttctctctttgacaacttattcgtgtagtgtggtttttggctaactgtttcgaatacatcttgtgccttaggatgtatcattttttcaccgttcataactcgtctaatagtttcaattaattgctgaggctcaacgtctttcatttcataaccatcagcacctttattgattgctgaaattacatgttcatcatcaacataacttgttaataccaaaactttaatatccggataatgtgccttaatatattccgtaatttcaataccattcatgccaggcatcactaaatctaatagcacaatatcagggtgctcatgctcttttaaatattctaaaaatgtttctccatctgcaaagtcttgtaaaacttctatgttttcaatcgtggataataaaaatcgcaatccttgtcgcacaatataatggtcatctactaatattactttgttcatgggttatctccttaaatcaagctattttataggaattgtgaattgtatttgtgtaccctttgttggctgagaatgaaaggtcactttacctcttaataatttaactctttgttttatgttattaataccgtgtgatgaagctatctgaacattatcgatctcaaatccttgaccataatcaatcacgtcaatatatagtatatcgttcatttgttttaatgtaagatccattttattcgtatcagcatgtttcttaacattattaatacactcttgtaatgctctgtatatgttttcttcgatttcattagataaatcgattaaaccttctacatttacatttaattgtatatgcattaatttactatatgctgtcaaagcatgaattaaaccttgctcaagtccaactggcttaagttgccaaatcaatgcacgcatttcattaacggcattttgactcgtttcctcaatcgtcttgaatgcttgtttagcgatggattcgtttgacatgccatacgcagcatgtgctgttagttttacagaaaataacatttgatttactgaatcatgtaaatctctagctaaacgattacgttcattaatttttgccgcttctttttcacggtctgttaaataaatacgtttgatggctgaccctaattgaaatgcgacagactctagcaactctaaatcttcatcgctatatatttcagtatttggagacgctacatttaaaatgccgaattgttcttgacccgatttaagtggtaccgttgcatgatgtgtaatattgtcattttggctaggaaatgctttagaggctaagttaatacgagaacaattgacgatattcgacgctttcattagcctacgttgattaaatgctttcacacaccaacaagacccatctttaatatagtgacagtggtctgctgtcaaagattgtggtagagccacatgtgatacaagttcatgttcacctacgctattgatgaaaaatatccagcctgtcgtgaaattactgccctcaattaaatattttaacgcaccttgggtcatgctatacatttcagtttcttcgtttaaaaattcggcaatctcttttaataaagctagtcgcgtcctttgttccatcaaatcgctccaattcatttttacgtgtattaactattatacattgagttattatatttttaaatcttagacgtaaacatgataaaatggccttgattactcaatagttatatttcggagaactgatttgtgatatgatattaaagactataggaggattttatgaaatttaaaataccagaaaactttaatgacttaagtttacgagatattttccaacaacttaaggtacctaaaaaagatttacatcatttaaatatgtctaaagatattactattaatgataaacctgcgcgattaatggataaagtgcatactggcgacgatgtatttgttccaaccatcgatgaaaaaagtaattatgttccaagttatcgttatgcacaaattaaatacgaagacgatgatatggcaatcgtaatgaaacctaaaggtgttaagactcaccctaatgatttaaaagaaagcaatactttaatgaatcatgtgatttacactattgatagtgactatgtcgaaccaattcatcgactggaccaggaaacagtaggattattaattgttgctaaaaatcctttaatgaaaaaaattcttgatcgcatgttagaagacaatgatattacgcggatatacaaagcaaatgttaaggcacttttacctttaaaaccacaaacgattgatatgccaattggtaaagataaattccattcgaataaacgacgtgtgtctcctactggacagcgtgcaattacacacattttaacttcaaaaatgataaaagaagctgtgtgccaacttgaaatcaagttggatactggacgtactcatcaaattcgtgtgcatttagctgaaattggtcaccctgttattggtgatcctttatatggtgattcaacgttaagacaattagaacttgaaagttacaaaatagagtttgtgcatcccttgactaaggaagtcatttccgtttctttggatgactaatttgattagttttgcatgatatttaaacatgcaataccgcattgtaactaaatcaagtatcaacttaaatcggatagatggaaaattattaattttttcagatgttcggtttttttgttttttacgatgcttaggattttatattttgatattttagtaattattcattttataacatccttggataatgacttgtagtctttttcaactgcgttacgtgtatctatggacaatacatgacatcataagatttttatcacaggttgtttggccaatacatgtacaacaattcatcatataaaaaataggttctataataaaacggactccatgaaaagtttttccttttcatggctctatatcaaatcagacttataagttcaatttgacatagacaaaaaataaagcttgaacactacatctacctgtaatgcccaaactttattttatattaatatttaattaatgaggatctaccatatcttctggtttaatccatgcttcaaattgttcttctgtaacatatccagtttgaattgcagattcttttaaagttaaaccttctttatgggctttcttagcaatttgagctgctttttcataaccaatatgtggatttaatgcagtaactaacattaatgattgatttaaataattatcaatattctcttcgattggttcaatgcccactgcacaattgttattaaatgtttccataccatcagctaaaagataaattgattgtagtgtattatgcataataactggtttataaacattcaattcaaagttaccttgtgaacttgcgaagccaacaactgtatcattacccattacttggactgcaaccattgttaacatttcacattgtgtaggattaactttaccaggcataattgatgaacctggttcattttcagggatagaaatttctgccaaaccagctcgtggccctgaagccaaccatctcacatcattagcaattttcattaagtctcctgctaatgccttcaatgttccatgcaattgaacaacttcatcatgcgctgtaagtgcgtggaatttattttcagaagatacaaatggataacccgtattttctgaaatataatgtgccactttatcaccaaattcaggatgcgcattaataccagtaccaacagccgtaccaccgatggcaagatttaaaatgtgcttcttagattcagataacattgtttcacaacggtcaagcatataacgccagccactaatctcttgtcctagtttgatcggcgttgcatcttgtaaatgtgtacgaccaattttaataattgaatcaaatttatcttctttttctttcaaagtatttcttaaaagttttaatgcaggttctaattttgtttcaacctcttgatataatgcaacgtgcatagcagttgggaatgtatcattcgaactttgagatttatttacatcatcatttgggtggatactttcatcactttgatgatcttttaaatacatattagcaacataacttactacttcgttcacattcatattactttgtgtaccgcttcctgtttgccatacaactagtgggaagtgttcatctaattcacctgataaaatttgatcacatgcgtatacaatggcatctttctttgcctcgcttaattttcctaaatcaaaattagctattgctgctgcacgctttagttgtgcaaaaccataaactacttcgattggcatacgctctttaccaactgggaaattacgtttacttctttctgtttgagcaccccaatatttatctgcaggtacttctatttctccaaaagtatcatgttcaattcttactgacattcaatttctccccttatcactgtttatttaactgtagtatatcattaaataatttaattgagcaatttatgattaaaacgttttcataatttgaaataaaaatacactaatcgcacgtgttcaccctttattacagtgatacggtcatacgattagtgtgttatctatcattatttagttattattgaactaagtttaattacgatactttgttttagtagcttcaaccgtagcaatagctgtaagtatatataatacagcactaacaattgtcgtatatggatttagagcaacaagcgtacctaaaactcctgttaaactcgcataaaacccatcaagtgtataatacaatattgctgttattaataaacaacaaattacactgattacaatacctgattgattacttttaatgaatgtttgcgcattaacatcatcaattaatccttttgataaattgagttgtaattttattactttgaaaataacaggtaaatataatgccccaattgccaatggaaaagctttaattgatattaaacttataataactgttgctatcaataattgaatccagtattttcctaacataaatatataaatctcctctaatttcattcttcaatagcatatcataatcttggcatattaagaaacgcggtttaatgatttcattaaaaatattactgatagatgacttctttcaattatgtctggagtaattaattatcaattccgtttaaatggtgttttaatatttaaaattgaacttttgatatattactatgtctggtacacaaatcaatgttttatgctttacaaagttatattggcagtagttgactgcagtccacaacatagaggcttcggaatgtcagcttctatttcatgcaagttggtggagctccaacatagtggaattggattcccaatttctacagacattgcaaattggggaaacgggccacaaactcagaaactggtggaaagtcagcttaaaataacatgcaagttggcgaggccccaaaatagtgagatcggatttctaatttctacagacattgcaaattagggaaacgggccacaaactcagaagttggtggaaagtcagcttaaaataacatgcaagttggcggggccacaacatagaaaaattggatcctcaatttctacaaacaatgtaagttggggaaacagccccaacactgaaactagcagaaagtcagcttctatgaatataataaaaaagctaggtaacaaaatgctacctaacttcatattcaagataatcaatcctatttgatatatgttctatactatacattatttacatgataaataactgaatattacacaattataatactttactgactgtcttcttcagaattcttttcttgatcattttgatcagagatttgttccatttctttacctaattcttttaaatcttcaaaatccgttaccatactgttttcttcttcatgataatttaattttggatctttgtctttagacataatcaatacctcacagatttttaattaagcaaagcgtgacgtaaagtaagctttaacatcttcaggtaaacctgcagccgcttctttatcaagaataacatttaccattctatgtgcttttaaatcggctggttcgaagcttgttttaccattttcttgatataatttttcaactacatctcgtttattagcacctgtcactactaagaaaatttctcttgcttccattagtccttgacgaatactaacatttaacttaccttgctcatcgatagaaacaacttgtaatgttaatttccctttattttctttagttttaatcttatcagcgattaattcgattgcatctttttcataagcaattggataaacttgacctgctggtacacctaacgcttcgaaatatgattttttatcgtcataatctaaaatatttatttggctaaaatcaacagcatgtttttcaacatttttctttaattcatctagaactggcgcttgatctgtatctaaatgaaaacctgcaattgtagtaggattattgttaaattgctttctaataatatcagcagcatattctgctacaagttgactattgtcaaagactttaaagttcattgccatgatttctacactcctcttagtttgcattttacataaaaacggcgatattaataattattataccctaactttcaatatatcaaaccatttaactttaacatgcttatactctaaatatagcacttaagcatcatttttataatgaaaatgagtaaattttaattcaatcccggaaaatcttgttgacgtaacgcttcataaattaacaacgcagcagtatttgataaatttaatgaacgaatatgttcactcataggaattcttaacgctgtgtcttgatatttctctttcacccagtctggtaatcctgtcgtttcttttccaaaaatgaagtaaaaatctttgtcatgatttgaaaaatcaaaatcactataagtctttttaccaaattttgttaataagtaatactcgccatttgtgacttcaaaaaatgcttcaatactatcatgatacgtaatattcacaaattcccaataatctaaaccggctctttttaacattttatcatcagttctaaatccaagaggtttaattaaatgtaaatgtgtgtttgtacctgcacacgtacgtgcaatgttaccagtattagctgggatttctggttgatataaaacgatatgatttgtcatattactattctctccttgtgtctaatccttttatcatttcattctgaacttctgcatcctcttgatcataattagcattgataaaatctcttgcttcttccccaagaatttgaccaatggcccaataagcagttgctcgaatcaacggtctttcatctgttgttgcaacttttttcaattctggaattgcatccacttcattaaaatgcgccaatgctaaaatagcatttcgttgtatcggctttttaccacgccaagcacctgcaaggtgaccatatgtttgtttgaattctttattagacatacgtagtaaaggtactaatcttggctttaaaatttctggttccaaaatgatgtcatcttgttcggtattaatacctctatttttcggacaaacttgttgacacgtatcacaaccatataatctattcccaattttataacgatattggtcaggcatatagccttttgtttgcgttaaaaaactaatgcatttctgactatttaattggccatttccaactaatgcacttgttggacaacgatcaacacaaattgtacaatcaccacagctatctaataatggatcatcaggttcaaaaggtatactgactaacatttcaccgaggtatgtccatgttcctagtttaggattgatgacaaagccattacgaccaacaaatcctaaacctgcacgttctgctactgccctatctgataatacacccgtatctaccatagatttgatttcaacatctggaactttagattcaataaatgcagctaacatgtctaatcgtttacgcataattgtatgataatcttgaccccacgatgctctagcaaataagcctctgcgatcacctctaacactcttaggtgcacctttcagtttgttaggataaccaactgcaattgctatgattgaccttgctgttggtaaggataatttaggctccgttcgtaaagcaatatcagattcttcaaatcctgaggcataaccatttgcatgatatgcttctagcttttgcttcaattcatcaaagggatcggcagtagtaaatccaatactgtcgataccaattgtatatgcatagtcaatgatatcttgctttaattgctttgtatccaatcgtatgccccccataaaataatactatgttattttaacacaaccattattcatattgaggtttcatttcacataattttaataataaaaagcttgaatatatgatataactttgtggtgcgtatcatatattcaagcttcgttaggttgttataatactcttgctaagaaattttgtgttctttcatgttgcggttgttcaaatatttcgactggtgtgcctgactctacgacaacgccatctgccataaatatgactttgtcacttacatctttggcaaatcccatttcatgtgtcacaaccaccatggtcataccttctttggctaggtctttcattacttttaatacatcaccaactacctcaggatctaatgctgaagttggttcatcgaataaaataacatctggatgcattgctaaagctcttgcaattgctaccctttgtttttgaccacctgataattgattcggatatacatctgctttttcttttaatcccactttatctaataacgacaatgcttccttatgtaattcatcgttattatctttctttaataatttaggagctaaaataatattatcgacaacttttttatgtggaaataggttgaagttttgaaataccatacccattttttgacgtagtttatctacttgtgtccctttttccgttaagtcattgccttcaaaaatcacttgacctttagtaggtacttctaataaattcatacatcttaacaatgtacttttaccactaccagatggacctattattgctactacttccccttgattgatttcaagattgatatcttttaaaacttcattatctccaaaaactttattaagattgtttattttaatcactggcattcaatctcccttcaatcatgttcataatgcgtgtaagtacaaatgttaagacaaagtataatgctgctgccactattaatggtgtgaatgggtcaaatgaaataccttgaaccacttgtgcattaaacataatttcgccaactccaattgttgacacaatagatgattctttaattaaagtgacaaattcattacctaaagctggtaaaatatttttaattgcttgtggcataattacacttttcatcgtttgtctataattcaaacctagactacgtgcggcttccatttggcctttatcaacagcatttatacctgcacgaataatttcagcaatgtaagctgaggaattaataactaatgcaattgttccacaaacaagagctgaaatgtctagtcctaatgcagcagttataccaaagaatacgataaatacttgaactaacattggtgttcctcttaatatttcgatatagatagaagcaatccatgaaataatttttattttacttaatttcattaacgcaacgaatgcacctaaaatagaacctaatgcaacaccgataagtgaaattaatattgtaatcttaattcctttcaagaaaaaactaccatacttagaaataaaaccactgtcatcattcatcgcatttgcagcattagtcatatatttatcgattaatcctttatctttaacctccttaatcgttttattaatttgtgacaataattttggtgaatcttttggcactgctatcactgtatctttttcttcttcattaaatttcacattggaaattcctaatttaggattttgttttaaatatgcttctgctacaggtttttcaactacagcaccttcaacctttccacttttcaatgctaatataacgtctggtaaacggcttaatgaagtaatagatgcattttcaatttcggtttgagcgattttttcttgttcagttcccttttgtgcccctacttttttattattaaagtctttgatatctttatattcattaactttatctttctttacaagcatgatatttttagtcatcatatatgaatctgaaaaatcaacttgcttcttacgttcaggcgttgaagtcattccggaaataataatatcaatttttccagttttaagagctcctaacaaactatcaaatgacatattgacgatttttaattttaaattattatctttcgcaatttttttagctaaatcaatatctacacctgcatactcagtcttaccattaactgtatgctcaaattccattggtgcataatctgcagaaagacccactctaagttcaccgcgttctttaatcttctcccatgtttgatcttgttcagcatgtgctgtgggattgatatacaccatagcactgctaattaacaaccctaatactaatataaacctaattaaacacttcatttatacagccctccctaattaatattcataattatacatattaatacattttgatgcaatagtgttttataaatgtatttttatcaatataaagaaaagcttctttttaaaagactgtacataaaaaatccgctattatacgtgaacaaatctcacattttaaaatcaatcaaaaaagcgctactatcaatatcttattgacagtaacgcctatatttatcatatattaaaacttattcttgtcatcaagctataaattattgttttggaacttcaaatttataaatatcattagaatatataggaatgaattttttacacaattcatgaacaataaatgccgatacaaatggtatgacaaaataaccaagtgctaataaaataatattcattgttggatcacctgacattcggttaaatgcatttattgggccaactaatcctgtatatccaaatccagcagacaatggtgttcctttaacctgaagaacgtaagcaatgattccagtaattattccatttatagtcaatggtatcgaaataattaaatttttcaagtaaactgggatcatcatttttgcagctcctatgagtaaaactgcatttacaccaatagaattgacacgcaatgagccaaataagaaagtaacacaggcagccactatacctaggtttgctgctccacttcctagtccgtttaaactaatcgcagttgcaatcgctactaacgatattggtgttaccattaataatgaaaatgccacactaataagtatagacattaacaacggatttaagtctgtaaaagaatgaattacatttccaattgcttgagtaatttttcgaatgtaaggtaatgtgattagaccgatacccccactaacgataggtactaaaactggtaatataattaattcaaaagatccaagtttgttttgtaataccatatatataagacatgcaataataacaaccaaactcgtatttataatgtcacctataccttttaacataaaactattattgctatatacaacagcacctgaaccaatcatagctgatgtacctactatagcagcacctgcaccattaaatttaaattgatgagcagctaaaaccccaataataaatgccataaatgattgaattagtatcactaactgatacgttaattctaaaatttcattaccacttttaaatatttttaatacttcacctaataaagcattcggaacaagtgcaataacaacaccagcaccaatagaatttaaaatcttactgaaaaactgtttattatcagcattatttgcgttactcataaacgacctccaatttgaacattaaactcatcatattatagaaaattaactttaacaatgattagttggctaatttaatctaaatataacaatccacaaattgaataaagcaaatttaaacaatctactcactaatcaatgtcatgttaattttaaaatactactaattacatcctgtgactaataatgtaataaattgtaaatattaaaatagccatattactattaagatagataaattgaatcgacttggtataaagcacaataaaatagcacttttacaaatatattattagaaaagttgaaacaaatatataaccccagataatataatcattatcattaatgtaataccaaaaaaagaagttaaacaggttcttcatcttttatggtgggaaggtaaaacttcctgctttttttaatacacaaaaagcgcaattgcctctataatttaaagtgaccaaacccaaactaaaggagacaagtgcgcctatgtgtaatgataccttagaattactaagaataaaagatgaaaatataaaatatataaaccaagaaattgacgtcattatcaaaggaaaaaaagcaacagtggttaatgctgtactaacgtataagccttcggcctgttattgttgtggagttaaaaatgaaggacaaattcataaacatggtaagcgtgtttctcgtattactttacttaaaactcaagggtataacacatacctcaacttagctaaacaacgttttaaatgcttagaatgcaatggcacttttactgctaaaacgtcaattgttgatgagtcgtgttttatctcaagatgtgttactcaaaaagttatagaagaagctactaaagttaaaacagagattgatactgcagaagataactgtatctctccatctactgtaagtcgtattagaactaaagcggctaattcattacgaattaaaccctttaattgtttgccagaacacatcgctatggatgaatttaaaagcgttaaaaatgtaactggatcaatgagtttcatttttatagataatgatactcatgatgttatagatattttagaaaatagaactacaagattcttgcgtgcctatttcgagcgattcgatttaaaaaatcgacaacaagttaagacggttactattgacatgtatgaaccctatgtccgattatttcgcgacctatttcctaatgcagctattatttttgacagattccatatcgttcaacatttaaatagagaacttaataagtatcgtgtacaagttatgaatgaataccgtaataaaaaaggacctgattatacaatttttaagaataactggaaagtcctattgatggatactagtaaaaccatatttagtaaatacagatggaataaatcttttaaggcttataaacgctcatctgacattgtagaattcatgctttcaaaagacgatatactacgacactcctacgaacttgtccaaggattacgaaaagacctaaggttatgtaattggcctaaatttattaatcgtttaaattcagttagtaaaaagtctgtgagtaagggtgtatggaaagtggttaaatattatagaaaacatcaaaggatgttaagaaatacaatttattacccagcatttaataatggtgctatagaaggaattaataataagataaaattaatcaagcgaatttcttttggttacagaaatttcaacaactttaaagcacgtataatgatgattttcagcttgtacaaaggagaaaaaagaagacaaccaagcccaataatggactggccgcctaataataaaaactctaaaagttgtattttaaaaatagttctttaaattatatacccaccacatttggtggagaaccaaaagaaaccttgttttacaaggtttctaatacgttatgttatgtaaataacagttaattataccggtggtcggggtcgaaccgacactccacaagtggaacgggattttgagtcccgcgcgtctgccaattccgccacaccggcttaatggtaaacaaaaaacttccctttggaagcaattatggagcggaagataggatttacacctatacctcgttccgggaaggaacgtgttctaaaagttgaactactcccgcaaatattaaattatggagcggaagataggatttacacctatacctcattccaggaaggaatgtattctaagagttgaaatactcccgcattattattaaattatggagcggaagataggatttgcacctatacctcgttccgggaaggaacgtgttctaaaagttgaactactcccgcataaacctggaggcggcaaccggatttgaaccggtgataaaggttttgcagacctctgccttaccacttggctatgccgccaataactgggctagctggattcgaaccaacgagtgacggagtcaaagtccgttgccttaccgcttggctatagcccattaataataagggcggctgaaggggatcgaaccctcgaatgtcggaaccacaatccgatgtgttaaccacttcaccacagccgccatggcaggggcagtaggaatcgaacccacaccaaaggttttggagacctctattctaccgttgaactatgcccctattaaaaataataaatggaggggggcagattcgaactgccgaacccgaaggagcggatttacagtccgccgcgtttagccacttcgctacccctccataaatggtgccggccagaggacttgaacccccaacctactgattacaagtcagttgctctaccaattgagctaggccggctaagaaatggttcaggacagagtcgaactgccgacacatggagcttcaatccattgctctaccaactgagctactgaaccataataaaaatgtaatgatggcggtctcgacgggaatcgaacccgcgatctcctgcgtgacaggcaggcgtgttaaccgctacactacgagacctataaaatattgcgggaggcggatttgaaccaccgaccttcgggttatgagcccgacgagctaccgaactgctccatcccgcgataataaaaaataatggcggaggaagagggattcgaacccccgcggcccgttaaggccctgtcggttttcaagaccgatcccttcagccggacttgggtattcctccattattataggtaaatcgctattaattataaaattaaatggcggtctcgacgggaatcgaacccgcgatctcctgcgtgacaggcaggcgtgttaaccgctacactacgagaccattagtaaaacggaggaagagggattcgaacccccgcgagccgttaagcccctgtcggttttcaagaccgatcccttcagccggacttgggtattcctccaaaattatatggaccttgcaggactcgaacctgcgaccgaacggttatgagccgttagctctaaccaactgagctaaaggtcctaaatataattttacaactaataaatagtggcggtggaggggatcgaacccccgacctcacgggtatgaaccgtacgctctagccagctgagctacaccgccttatatagtttgtaaataatatggtggagactagcgggatcgaaccgctgacctcctgcgtgcaaagcaggcgctctcccagctgagctaagcccccataataattacagtatatcgggaagacaggattcgaacctgcgaccccttggtcccaaaccaagtgctctaccaagctgagctacttcccgtataattaacgcgcccgataggagtcgaacccataacctcttgatccgtagtcaaacgctctatccaattgagctacgggcgcatatgtttttattgaaaatggtgccgaggaccggaatcgaaccggtacggtgatcactcaccgcaggattttaagtcctgtgcgtctgccagttccgccaccccggcactataaaaatggagcagaagacgggattcgaacccgcgaccccaaccttggcaaggttgtattctaccgctgaactacttctgcatatgcgggtgaagggagtcgaacccccacgccgtaaggcgctagatcctaagtctagtgcgtctgccaattccgccacacccgcaaatggtgagccatagaggattcgaacctctgaccctctgattaaaagtcagatgctctaccaactgagctaatggctcttccatggtgccggccagaggacttgaacccccaacctactgattacaagtcagttgctctaccaattgagctaggccggcaatatgtaagaataaatggtggagaatgacgggttcgaaccgccgaccctctgcttgtaaggcagatgctctcccagctgagctaattctccgatttaaaactnnnnnnnnnnnnnnnnnnnnnnnnnnnnnnnnnnnnnnnnnnnnnnnnnnnnnnnnnnnnnnnnnnnnnnnnnnnnnnnnnnnnnnnnnnnnnnnnnnnnnnnnnnnnnnnnnnnnnnnnnnnnnnnnnnnnnnnnnnnnnnnnnnnnnnnnnnnnnnnnnnnnnnnnnnnnnnnnnnnnnnnnnnnnnnnnnnnnnnnnnnnnnnnnnnnnnnnnnnnnnnnnnnnnnnnnnnnnnnnnnnnnnnnnnnnnnnnnnnnnnnnnnnnnnnnnnnnnnnnnnnnnnnnnnnnnnnnnnnnnnnnnnnnnnnnnnnnnnnnnnnnnnnnnnnnnnnnnnnnnnnnnnnnnnnnnnnnnnnnnnnnnnnnnnnnnnnnnnnnnnnnnnnnnnnnnnnnnnnnnnnnnnnnnnnnnnnnnnnnnnnnnnnnnnnnnnnnnnnnnnnnnnnnnnnnnnnnnnnnnnnnnnnnnnnnnnnnnnnnnnnnnnnnnnnnnnnnnnnnnnnnnnnnnnnnnnnnnnnnnnnnnnnnnnnnnnnnnnnnnnnnnnnnnnnnnnnnnnnnnnnnnnnnnnnnnnnnnnnnnnnnnnnnnnnnnnnnnnnnnnnnnnnnnnnnnnnnnnnnnnnnnnnnnnnnnnnnnnnnnnnnnnnnnnnnnnnnnnnnnnnnnnnnnnnnnnnnnnnnnnnnnnnnnnnnnnnnnnnnnnnnnnnnnnnnnnnnnnnnnnnnnnnnnnnnnnnnnnnnnnnnnnnnnnnnnnnnnnnnnnnnnnnnnnnnnnnnnnnnnnnnnnnnnnnnnnnnnnnnnnnnnnnnnnnnnnnnnnnnnnnnnnnnnnnnnnnnnnnnnnnnnnnnnnnnnnnnnnnnnnnnnnnnnnnnnnnnnnnnnnnnnnnnnnnnnnnnnnnnnnnnnnnnnnnnnnnnnnnnnnnnnnnnnnnnnnnnnnnnnnnnnnnnnnnnnnnnnnnnnnnnnnnnnnnnnnnnnnnnnnnnnnnnnnnnnnnnnnnnnnnnnnnnnnnnnnnnnnnnnnnnnnnnnnnnnnnnnnnnnnnnnnnnnnnnnnnnnnnnnnnnnnnnnnnnnnnnnnnnnnnnnnnnnnnnnnnnnnnnnnnnnnnnnnnnnnnnnnnnnnnnnnnnnnnnnnnnnnnnnnnnnnnnnnnnnnnnnnnnnnnnnnnnnnnnnnnnnnnnnnnnnnnnnnnnnnnnnnnnnnnnnnnnnnnnnnnnnnnnnnnnnnnnnnnnnnnnnnnnnnnnnnnnnnnnnnnnnnnnnnnnnnnnnnnnnnnnnnnnnnnnnnnnnnnnnnnnnnnnnnnnnnnnnnnnnnnnnnnnnnnnnnnnnnnnnnnnnnnnnnnnnnnnnnnnnnnnnnnnnnnnnnnnnnnnnnnnnnnnnnnnnnnnnnnnnnnnnnnnnnnnnnnnnnnnnnnnnnnnnnnnnnnnnnnnnnnnnnnnnnnnnnnnnnnnnnnnnnnnnnnnnnnnnnnnnnnnnnnnnnnnnnnnnnnnnnnnnnnnnnnnnnnnnnnnnnnnnnnnnnnnnnnnnnnnnnnnnnnnnnnnnnnnnnnnnnnnnnnnnnnnnnnnnnnnnnnnnnnnnnnnnnnnnnnnnnnnnnnnnnnnnnnnnnnnnnnnnnnnnnnnnnnnnnnnnnnnnnnnnnnnnnnnnnnnnnnnnnnnnnnnnnnnnnnnnnnnnnnnnnnnnnnnnnnnnnnnnnnnnnnnnnnnnnnnnnnnnnnnnnnnnnnnnnnnnnnnnnnnnnnnnnnnnnnnnnnnnnnnnnnnnnnnnnnnnnnnnnnnnnnnnnnnnnnnnnnnnnnnnnnnnnnnnnnnnnnnnnnnnnnnnnnnnnnnnnnnnnnnnnnnnnnnnnnnnnnnnnnnnnnnnnnnnnnnnnnnnnnnnnnnnnnnnnnnnnnnnnnnnnnnnnnnnnnnnnnnnnnnnnnnnnnnnnnnnnnnnnnnnnnnnnnnnnnnnnnnnnnnnnnnnnnnnnnnnnnnnnnnnnnnnnnnnnnnnnnnnnnnnnnnnnnnnnnnnnnnnnnnnnnnnnnnnnnnnnnnnnnnnnnnnnnnnnnnnnnnnnnnnnnnnnnnnnnnnnnnnnnnnnnnnnnnnnnnnnnnnnnnnnnnnnnnnnnnnnnnnnnnnnnnnnnnnnnnnnnnnnnnnnnnnnnnnnnnnnnnnnnnnnnnnnnnnnnnnnnnnnnnnnnnnnnnnnnnnnnnnnnnnnnnnnnnnnnnnnnnnnnnnnnnnnnnnnnnnnnnnnnnnnnnnnnnnnnnnnnnnnnnnnnnnnnnnnnnnnnnnnnnnnnnnnnnnnnnnnnnnnnnnnnnnnnnnnnnnnnnnnnnnnnnnnnnnnnnnnnnnnnnnnnnnnnnnnnnnnnnnnnnnnnnnnnnnnnnnnnnnnnnnnnnnnnnnnnnnnnnnnnnnnnnnnnnnnnnnnnnnnnnnnnnnnnnnnnnnnnnnnnnnnnnnnnnnnnnnnnnnnnnnnnnnnnnnnnnnnnnnnnnnnnnnnnnnnnnnnnnnnnnnnnnnnnnnnnnnnnnnnnnnnnnnnnnnnnnnnnnnnnnnnnnnnnnnnnnnnnnnnnnnnnnnnnnnnnnnnnnnnnnnnnnnnnnnnnnnnnnnnnnnnnnnnnnnnnnnnnnnnnnnnnnnnnnnnnnnnnnnnnnnnnnnnnnnnnnnnnnnnnnnnnnnnnnnnnnnnnnnnnnnnnnnnnnnnnnnnnnnnnnnnnnnnnnnnnnnnnnnnnnnnnnnnnnnnnnnnnnnnnnnnnnnnnnnnnnnnnnnnnnnnnnnnnnnnnnnnnnnnnnnnnnnnnnnnnnnnnnnnnnnnnnnnnnnnnnnnnnnnnnnnnnnnnnnnnnnnnnnnnnnnnnnnnnnnnnnnnnnnnnnnnnnnnnnnnnnnnnnnnnnnnnnnnnnnnnnnnnnnnnnnnnnnnnnnnnnnnnnnnnnnnnnnnnnnnnnnnnnnnnnnnnnnnnnnnnnnnnnnnnnnnnnnnnnnnnnnnnnnnnnnnnnnnnnnnnnnnnnnnnnnnnnnnnnnnnnnnnnnnnnnnnnnnnnnnnnnnnnnnnnnnnnnnnnnnnnnnnnnnnnnnnnnnnnnnnnnnnnnnnnnnnnnnnnnnnnnnnnnnnnnnnnnnnnnnnnnnnnnnnnnnnnnnnnnnnnnnnnnnnnnnnnnnnnnnnnnnnnnnnnnnnnnnnnnnnnnnnnnnnnnnnnnnnnnnnnnnnnnnnnnnnnnnnnnnnnnnnnnnnnnnnnnnnnnnnnnnnnnnnnnnnnnnnnnnnnnnnnnnnnnnnnnnnnnnnnnnnnnnnnnnnnnnnnnnnnnnnnnnnnnnnnnnnnnnnnnnnnnnnnnnnnnnnnnnnnnnnnnnnnnnnnnnnnnnnnnnnnnnnnnnnnnnnnnnnnnnnnnnnnnnnnnnnnnnnnnnnnnnnnnnnnnnnnnnnnnnnnnnnnnnnnnnnnnnnnnnnnnnnnnnnnnnnnnnnnnnnnnnnnnnnnnnnnnnnnnnnnnnnnnnnnnnnnnnnnnnnnnnnnnnnnnnnnnnnnnnnnnnnnnnnnnnnnnnnnnnnnnnnnnnnnnnnnnnnnnnnnnnnnnnnnnnnnnnnnnnnnnnnnnnnnnnnnnnnnnnnnnnnnnnnnnnnnnnnnnnnnnnnnnnnnnnnnnnnnnnnnnnnnnnnnnnnnnnnnnnnnnnnnnnnnnnnnnnnnnnnnnnnnnnnnnnnnnnnnnnnnnnnnnnnnnnnnnnnnnnnnnnnnnnnnnnnnnnnnnnnnnnnnnnnnnnnnnnnnnnnnnnnnnnnnnnnnnnnnnnnnnnnnnnnnnnnnnnnnnnnnnnnnnnnnnnnnnnnnnnnnnnnnnnnnnnnnnnnnnnnnnnnnnnnnnnnnnnnnnnnnnnnnnnnnnnnnnnnnnnnnnnnnnnnnnnnnnnnnnnnnnnnnnnnnnnnnnnnnnnnnnnnnnnnnnnnnnnnnnnnnnnnnnnnnnnnnnnnnnnnnnnnnnnnnnnnnnnnnnnnnnnnnnnnnnnnnnnnnnnnnnnnnnnnnnnnnnnnnnnnnnnnnnnnnnnnnnnnnnnnnnnnnnnnnnnnnnnnnnnnnnnnnnnnnnnnnnnnnnnnnnnnnnnnnnnnnnnnnnnnnnnnnnnnnnnnnnnnnnnnnnnnnnnnnnnnnnnnnnnnnnnnnnnnnnnnnnnnnnnnnnnnnnnnnnnnnnnnnnnnnnnnnnnnnnnnnnnnnnnnnnnnnnnnnnnnnnnnnnnnnnnnnnnnnnnnnnnnnnnnnnnnnnnnnnnnnnnnnnnnnnnnnnnnnnnnnnnnnnnnnnnnnnnnnnnnnnnnnnnnnnnnnnnnnnnnnnnnnnnnnnnnnnnnnnnnnnnnnnnnnnnnnnnnnnnnnnnnnnnnnnnnnnnnnnnnnnnnnnnnnnnnnnnnnnnnnnnnnnnnnnnnnnnnnnnnnnnnnnnnnnnnnnnnnnnnnnnnnnnnnnnnnnnnnnnnnnnnnnnnnnnnnnnnnnnnnnnnnnnnnnnnnnnnnnnnnnnnnnnnnnnnnnnnnnnnnnnnnnnnnnnnnnnnnnnnnnnnnnnnnnnnnnnnnnnnnnnnnnnnnnnnnnnnnnnnnnnnnnnnnnnnnnnnnnnnnnnnnnnnnnnnnnnnnnnnnnnnnnnnnnnnnnnnnnnnnnnnnnnnnnnnnnnnnnnnnnnnnnnnnnnnnnnnnnnnnnnnnnnnnnnnnnnnnnnnnnnnnnnnnnnnnnnnnnnnnnnnnnnnnnnnnnnnnnnnnnnnnnnnnnnnnnnnnnnnnnnnnnnnnnnnnnnnnnnnnnnnnnnnnnnnnnnnnnnnnnnnnnnnnnnnnnnnnnnnnnnnnnnnnnnnnnnnnnnnnnnnnnnnnnnnnnnnnnnnnnnnnnnnnnnnnnnnnnnnnnnnnnnnnnnnnnnnnnnnnnnnnnnnnnnnnnnnnnnnnnnnnnnnnnnnnnnnnnnnnnnnnnnnnnnnnnnnnnnnnnnnnnnnnnnnnnnnnnnnnnnnnnnngtttcccgaagttatcccagtcttataggtaggttatccacgtgttactcacccgtccgccgctaacatcagagaagcaagcttctcgtccgttcgctcgacttgcatgtattaggcacgccgccagcgttcatcctgagccaggatcaaactctccataaaaattatgatgtttgattagctcataaatactaaataatgtttgtaacttatagttacgtttttggaattaacgttgacatattgtcattcagttttcaatgttcgtttgtcacttacaagatttaattataactcgtaagtttttgtaagtcaagaattatttttaattattttatttctaaaaaataaatttcctaactcaattaattcaacaaatattattttattatgtatttgttcgaatttcaatagtcaaatttacactttattaatattttaaatcaacaacttaaaacatttgttttttaaatattagtgccgtttgacgacttttatataatatcaagttattctagtagagtcaacataaaacaacacttatttttgtttaaaaattactgttgaagggattattttctattcgtaagtactatatgtatttaaagtgtaattccttatgctttttacttcagttttacaaacaaacttatactcactttatggatagttatttagtagaccttcgtttgaatatttttatgtttatttataaaggatactagttattagttaataccacttccgtagttagaatattcttttcttcaatttaaatatttttcagaataagcataaaaaaaagttaaacaactttcatgtcgtttaacttcttaaatattacgcttacttatatgaagtaagctaacgcttttttaatttgtcatactaccaaagttaaattatttatcttggcattctttacaaactccataaatttccattcgatgatgtgttacgtcaaagtcagtcatatgctgagctaatctttcaatttcatttaactgtggatattgaaaatcaacaatcttaccacattgttcacatataatatgataatgattatgtgtattaaagtcgaatcgacttgatgagtctccatatgttaattcttttacaattccaatatctttaaacactcttaagttattatatattgtcgcaacacttatatttggaaaatcaggtgaaagtgcttgataaatttcatcagctgttggatgagtatgtgaagaaattaaataacgtaatattgcttgtctttgaggtgtaattcttacgcctgcttgtcgcaatgatgcaattgattcttctagttcatgttcaattgattctatttcaacactcatctatatcaccatctttcttatataataattattattacttactataaatataactgtagtattgcgcgcgtgtcaatatttacatgatgatttcatttaatagccttttttagcatcaacttcattctcaattagaccattcttattgagaaaattaactagattgtttttaaaaatatctaataagtcatactttgcttcataatcattaccagttatatgcgctgttatagttacattatccaattcatataattcatgattaggtttcaaaggttcattttcaaacacatctaaatatgcatgtcgaataactttactttttaatacttctattaagagcgcttctttaactatgctacctcgtcctatatttataaaaagtgcttcatctttcattaattcaaaatgttttttctttagtaaatgaatcgtttcttgtgtttctggtaaagcatttataataatgtcagcatttggtaatgtgctttcaagtgattcgatagtatatatctcgtcaaactcatctttgttctgacctgacttgctaagaccaattaaattcatattaaaagcctttgctaacttcgcagttctagtagcaattgcacctgtacctaaaaataaaactgtttgtcctgataggcgtttaccagttattttcgaatcatatatatgttgtcgttggttatcatatgatagtttcatctttttataatcatctaaaatgaaagctaaaatgtattcagataattgtttagcttgaacaccttttccattagttaaaagtatgccgtgatctgcaatataatctaacggcaatgtatttacacccgttgcaaaccatgcaatccattttaaattcgggcaacgtcgtaaaaatgcctcattgataccgccatcataaccaactaatatatctaaatcagccaagtcgctctcaggtatttctgatgcttttttataaaatttaaaatctaaatctgaaaagcgttgttgtaattcagtttcaacttcacgcatacgatttaacccaacaactttcatatatgtcaccccaaaatgtttttaagttcttctatttgtgttttaaccttaaccttctcgataacatctaatactttaccttgttcatctattataaaagtcgttcttacaatgcccatactttctttgccaaatgatttttttaactgatatacgccagtttctttagctaatttaaaatcttcatctactaataaatcgaaattcaatccgtgtttctcaataaaattttggtgttttttctttgaatcaccgcttataccatatactgcaacatctaaatcattgaacatttctaaattgtctctaaagtcacaagcttctgtggtacaagtaggtgtattatctctaggataaaaatatataatcgcctttttaccttttaatgtatcatttgtaatgacagttccgtcttgattttctaatttaaatattggaaattgttctcctttttgcaacatataatcacctttttcttcattataataattttatgatacgatattagatgaaaatattaaattaaaagaggttgatataaatgaattttagtgaaagtgaacgtttacaacaactttcaaacgaatatattctaggcggtgtcaattccccttctcgttcttataaagctgtaggaggcggtgcacctgttgttatgaaagaaggacacggtgcatatttatatgatgtcgatggcaataaatttattgattaccttcaagcatacggtccaattattacggggcatgcacatcctcatattactaaagcaattcaagaacaagctgctaaaggtgttttatttggtacaccgactgaattagaaattgaattcagcaaaaaattacgtgatgcaattccatctcttgagaaaattcgctttgtaaattctggaacagaagcagtcatgacaacaattcgtgttgcacgtgcatatactaaaagaaataaaattataaaatttgctggatcttatcatggccattctgatttagtattggttgcagcaggtagcggcccatctcagctcggttctccagactcagctggtgttccagaaagcgtcgcacgtgaagtcattactgtacctttcaatgatattaacgcctataaagaagcaattgaattttggggtgatgaaattgccgcagtattagtagaaccaattgttggtaactttggaatggtaatgcctcaacctggatttttagaagaggttaatgaaatttcacataacaatgggaccctagtgatttatgatgaagtaattactgcattccgtttccattacggtgccgctcaagatttattaggtgttatccctgatttaactgcatttggtaaaattgttggcggtggtttaccaattggaggctatggtggacgtcaagatattatggaacaagtagcacctctaggacctgcatatcaagctggtacaatggctggtaacccgttatctatgaaagcaggtattgcattactcgaagtactagaacaagacggtgtttatgaaaaattagacagcttaggccaacaactagaagaaggtttacttaaattaatcgaaaaacataatatcacagctacaattaatcgtatttatggatctttaacattgtactttacagatgaaaaagtcacacattatgatcaagttgaacattctgacggcgaagcgttcggtaaatttttcaaattaatgttaaatcaaggtatcaatttagcaccttctaagtttgaagcttggttcttaacaactgaacatacagaagaagatattaaacaaactttaaaagctgcagactatgcttttagtcaaatgaaataacttttaaggaagtatatttttaattgaattaaaataaagcaaatgctcacatagtagattcattttatatcgttaactattaacgtttaacttgatatgtcactatgtgagtttttattttacaaatttatactattttaatctctgactaaagttttacatcgctatcagtattatgtatgatttattttaacaactataaataagcttgaattttgtaactagtaagtgtataacagtaatgaatacgaatattagatattcaataaacttaaaaggggcgtcattatttttgagactaggagctcggatttttaaaactggtatagccattattttagctatgtctatcgcttctttactaccggatgatgttggtctgaaagccttagctggtgtcagtgctgttgttgcaatgcaacctagtatttatcgttcatttaaaacagtttctgatcaagcattgggtaacattataggtgccatactatctgttacaatggtaacaatttttagtgataattttatcattatgggtgttaccgtcatagtacttattgctattttatttaaatttaatttagcacatgttgctactttggcgagtgtaacagcattaatcattatgggacaacataccggttctttctatattaccgccttttacaggtttgtacttgtaatgattggtgtcataagttcatctctagttaactttgtgtttctaccacctaaatttgaaacaaaaatttactataattcattaaatatatcctcagatatttttatgtggtttaaattagtattaaatgatacgacggagtttaataatattaaacaagatagtcataatttaaaacaacgtgtcgaaaagttagagaaaatttatgattactatagcgaagaacgtcctattacaaaaaaacatattcaccaacagaatagaaagaaaatacttttcagagaagtagttcagacgactagacaagcttatgaagtattaaacaaattgtcgcgttatcaaaacgacttatatttacttaataacaatttcctattacaaatcaaattagatttagattcattaactgcttttcacgagcaaattttagctagcctttctaaaaaagcacgttataatgtgacacatgttgattatgagttagataatccgcagaaaaaagatttattgtccacatttcagcatgagttaataaatcatccttatcaaacggaatattcgtttgccaatgttatgcaaattgttgcagccatcgaagagtatcgacaccatttagagcatttagaccgcataagaattagctttttcacatatcatagatctgatgcagacattgaaattgttgaagaagactttgatttataacattaaaacaattttatcaattaatgccacaatgagataaactaatattgaatctcgaaattaaatttaaaaaagcagtaagattattttcaattaagaaaatctcttactgctttttctatgttatgaccccaccatcctgttacaaattttctcttcaagattgtactgaagtcaaacaactaatactttataagttttgaatgctatataaatgctcgtaagcaccttgttttgcaatcaattcacgatgcgtacctgtttcaacaatatgtccattttcaattacgacaattttgtcagcatgtgtaatagtggacaagcgatgcgctacgataagtgtcgttcgatctttactcaacacatctaatgcttcttgaataatggattcactttctaaatcaagtgcacttgttgcttcatccaagataagaattggcggattatttaaaaatattctagcaatcgataatctttgtttttgaccacctgataatttaacacctcgttcacctacttcagtgtcatatccctgtggcaagttcataataaagtcatgtgcattagccattttcgccgcttcaactacttcttcatctgttgctgttggacgaccaagtaaaatattttccttaactgtatcagagaataaaatattatcctgttgcaccaatcctatttgatttcttaaacttcccgttaaaaaatctttaatgttgtgaccatctattaaaatttgcccagaagttacatcgtaaaatctcggtattaagttaattaatgttgatttaccaccaccactcatacctacgaaagcaactgtttctcctttttcaatactcaaattaatatcttttaaaattggagcttcgttatcgttatattgaaaactaacatgatcaatatcaatacgaccttgtttaatttcaataggttgagcaccaacaccatttttgatgtcataatcttcatcaattaattggaatacacggtccattgaagcaaaactttgcgttaaagttgtaaatgatgcgactaaacgacgtaaaggcccgaacaataactctaagtatccaacaaatgctgcaagtgtacctactgtgattgatccagaaatagcaagatatgcaccaacaccgatgacaataattggtccaatatctgtaactgtattaattgcggcaaaggaataggcattccatcttgtatgtttcaacgcacgtgttaggaaattagtattctttttatcaaagtttttcgcttcattgtcttcaatcgcaaaacttttaacgactgaaataccttgaacacgttcatgcaagaatccttgaacctcagctaatgcttgagatctttcacgtgtcaattttcttaatcttccaaagaaaacgtacaccgttaaaatgtaaaatgggaagataaacagtgctgctaaagtcaatttcacatctaaaaagaacattatggatagtgcaataataattgttatacaatctaaccaaatattcattaacccggttaaaatgaaatcttttgtttgttcaacatcattaatcactctagatattacttgacctacttgattattagcataaaatctcgcacttaaagcttgtaaatggttgtataactttttacgtatatcatacaatattttattacttgtccattgcgccaaatattgacgtataaattcaattggtggtctcactattacaaaaataaataatgcgataccaatggcaatagttaaatgatgaactttttcatcagtcgttagtgcgtggttattaatcacgccatctattgcatatttaattaatagtggtataagcattggtataccaaacttaattatcccaacaataatcgttgcaaaaatacgatatttgtatggcttaacaaattgcaaatatcgtttaatcatacaatcccccctaatctattgccctatcctattcataagcataaaaatgaatagaggttggatacataatttgtagatgtaaattcttcttacaatttacatttttaaaattaagatatctcaacctctgtcatattcatgtgattaaatacgttgtcttattcgtatgttatattctattcaatttaatctatggatactgtgtccccacacgacagcaaaagttatcatacttctttacatcactaagtcaatataaatgatttaatcagtatttacactttatttgcttaatactgtctaatttttttgtaacgttctttccaaactttgataaaatctggcgcgaatgggcccttcttctgttctatccattgttgaagaatgtccacgttgcgtcttaaaataatatcaatatcatgcggataattcatttgattcatatgttgctcatattcatcttcatctaataaatgatactttccgtttggatatactttaatatctaaatcatagtctatatattttaatgcctcttcatcacaaacaaatggtgatgacaaattgcaatagtaataaattccatcttctctaaacatgcagataacattaaaccaatattctgagtgaaagtaaacaattgccggttcacgtgttatccaagttcttccgtcactttcagtcactaacgtatgatcatttccaccaatgacaacatgatcagtaccctttaatattgttgtttcagaccaaacgcgatgaatcttaccatcatgtttataactctgaattttaatgttttccccttctttaggtatggattctctgaccatactccacaccaccttctgttaatttaaccattataaattatagcatatttcagaaatagtattatataaatacatatttttacgaaataagattttactacttaataattaaactcggtaatattgctaagtactacaacagagatttacatgtcccatttaaagtatataaaatcatcacttttatatatcaacactttaactttttgacattgttattctatgagatttaaagatatcatttatactttttaaaattaatgtcactatgttttccgataatattaccaatcatcgaatgttacccatttataaattgataaatctttgacataggtacagggaatgtatattgatctcgatcacttaaatcaaaccaaatcatgtcatctggtaatgtttcaatgttaattgctcctgaaacggcgtatactttaatcttccatgttaaatgagtaaattgatgcttcaactcaaaaataggtgtttctactggttgaatgtcatgaccgattttttcagtcattttacgtctagcatgctcactttcaaacataggaaattgccacataccatgcaataatttttcgctacgcttttgcaacagatattgaccttgattatttctaattaaaaagacggattgctcaattacttttttacttacatttttagatttaacaggtaacttttcaaatgtacctttatcaaatgcctcacagttttcttgaactggacaaaataagcataatggattttttggtgtacaaattaacgcccctaattccatcatagcttgattaaacgttccagcttctgtagtaacatacggtaataattcttgttcgtacgatttcctcgtcgattgtaatttaatatctcgatagtcatcattcaatctagaccatactcgaaaaacatttccgtctacagttgctagtggtacattatatgcaatgctcattactgcagcttgtgtgtatgggccaacaccttttaacgctttaaattgatcaggatctttgggaactaagccttcatatttatcatgaacttctttaatcgccgtatgaaaatttcgagctctactataatatcctaagccttcccaatactttaacacttcatcttccgaagcttgactcaaaacttccacagttggaaatcgttcaacaaaacgatgataatagtcaataactgttttaacttgtgtctgttgtaacatgacctcacttaaccaaatatagtacggattggtcgtttgtcgccatggcatttctctttgattttcatcaaaccagtgtatcaaattttctttaaaactagactgctgatacatttataaaaccctttcctcaccaaaattaattgtctttactcataatgtttttattgtacattaaaatcatggttagtatgtaagttaatttagttatttgcgaaattggattataatagtatatataatattatgaaatgagtgaactgatatggacactgcaacacatatcgcaattggggtgggccttacagcacttgcaactcaagatccagcaatggcttctacgtttggtgcaacagctacaacccttatcgttggttcattaattcctgatggggatactgttcttaaattaaaggacaatgcaacatatatttcgcatcatagaggtatcacgcattccatccctttcacaatactatggccaattttaattacatttttaatattcacgttctttagtggaaccaacccatttcatgtatggatgtgggctcagctcgcagtatttttacatgtctttgtagatatattcaattcttatggtacacaagcgcttagacctatcacaaacaaatggattcaattaagtgtgattaacacatttgaccctattattttcacagttctttgtattggtattgtattatgggttataggcttgcatccatttgcagtcttctttcctataatcgctttactaatcatttattacatgattcgttttaaaatgagagccgtaattaagcaacaagctttaaaagcaattcaacaagagcatcaccctgttaaagtatttgttgcgccaacaataaaatttatggaatggcgtgtcgcgatacaaactgatgcacatgactatgttggaaaagcatatggtaggaatgtggtgtttagtgataaagtggaacgtcaaacattatcaacagactccattttatggaaagtcaaaggtaataaagatatacgtacttttttaaacttttcatcaatctatcgttggcaaacaacaacgttagcagatggttctactgaaattcgtttgattgatttgcgttatttaaaaaatgatcattattcatttgtggcaattgcacatgtaacaaacgataatgtcatagaccactcttatattggctgggtatttacagaagataagttacaacgtaaactgtatgctaaataatttcaagttattattcactaaagttaatctataaaaaatgaacaaccgggcagaatgaaaatcaaaacgatttttactctgtccggttttttaatgtaaaactatgaatgcttttacaaaatctaaaatttatattgttgctaacaaactacctttaatgactcgaaatatcaaaatcagtataggaaaacaatatctagatgatattctaattgtttctgattctcacagattaatttacacaacaggtcagctaaacatcatgaagaagtatccgcctcgtctgtactatcatttgaaacatcctgttgattatcagtttgtgtcactttagatgttttattataaattgcgtgtgtcgtataccttgctaatacgaaatttactgcagctattaaacataagaataaaataaagtaaaaatgatatggaatgttttccatacttgatataccaaatatgatagattgtgctataccattaacaatgtaatacattggatttagcattaggatgtgattgataaatacatgatttggatttggtatgaaaataattggtaacaataagaaacacaatacacaaaccccataaaatatgatatttattttttcagttaacagtcgaataagaccaaaagtaacggatattaatcctacaaaaatagttgccatcacaataaaatagaatagcgctatatatgatgtttcgaagtttactggtttaaccaatgcactaatcatcgtcaaaatgactagcataataaaacttaaaatagacataataactactggcgtcgctgcggaaatattaaataacttagtaactaaaaagtcattcatataatgatgataagagatataaattgtgaacatcactaccgcaaaaacaatcaatacaatgattctaaataaccatctcacctctttaacatcggtcaaatgactaaaggaaaatagcgtttcacttgcaataataagtattaaacatgcagctaatacgattagaaaacttttccaactttgttttaaacgttctgttacataccttttagtatgcggtaagtttttaaaatataaaataatattatctagcatctttacacctacaattcaatataaatccatttgtcttctttcaaattggcaatacaatatccattcccaactttagtaatccaaatgttattgttaatattaaacttatcttttaattcttttttatctacaattggataaacaaaaccgtataactgattattatcattgaaaagtaattgtatcggttgttgtgtaacggatgcaacgaaacggttatcatcatcaggaactaaagtttttataactgaactatgctttttatgtaattgactattaaagtatgcatagtaattactataatttgatttcatatatggtgctaattttttaaaactatgcgtttgatataaacctgccgggttaaaatattctaatttatctttactaacatagtaagtcttattatcggcggtaacacgataatttttactattttcgccagtaattgtaactacactatattttggaattgtgacttgtttatccccttgcatatccacactgccattaaaagcaattccataagctaacttttcgccatatggatctttattttcattttgcatcgtagcacgattcgtaaaatctgttatcgaaataattcctatattattgaaaatgagcaacatcatcaatgctaagcctaaaatagtacctgaggctaaagtccaaaaacgcactaaaaacttaggcggttttgcatgattatagcgctcaacacgtttgaaattataggtcatctctggtattcttgtacgattctttttccaatctaaatcaaagttttcaatttcttcttttgagtttagacttaatcgatcacgttcatgttctttaaaagatggaataacttgtttaagtgacccttccattcttaattgaccatgtgaaaaccaagctatgtagttactcacttgtgaaattttatcaatatcatcaccaattgacacaatcgttaaattattttcaatataatcatttgttaattcaatcgcacgttccataaattgtggtgttaaatagtcaataacatgatttaaaataataatatttgattttgatgagcgtgcaatacttaatagtaattgagcgtatgccgctttcgaaatatggttaaccggcttcgttttataatcacctaaatgtgcatattgaataatctgttcagctttatgatcattaatttcatatggaaatagttgaactaactgcgctgtataagcttcaacagtttgatgaattaacgattgatcttcaatatatccgtagaacaaatcttcagtacaaactactttacctttatcaggtttaattgcacctgccaacaattgacctaccaacgctttggaagattcaggttcaccaattatacctaatgcttctccttgataaatatgtaaactaatattgtttaaatcgatatcttcagcatcatatccaaaaggtaaataccatttcttattctgtttattcctatagtagtgtgttacttttagtaactttaaaacaattgaacttcccatctattttcatccttctataattgtaataacgctataggtaatccttcttcgggttcatcgctattaaatctaaacccccacgcaaaaataccttttaatctttctactttaaaatattgattactgccatcagtcagtttataaattttaccaatttctatcttttttctgtctactaagtaactttcggcaacaattactttactttgataaacgtcatattcatttaaaataccattcatctcagcttttctcattttctctttataaagttgtatttcgtgtcttaattctggctcagacatctcactcaatttcttctgttccatcggcaataccactttcttctaatttagctttaattttatcatatttatatccttttctcataaggccttcgatagtttttgaaattaatttctgttgcgtgtacttctttcgatttttattataaattttttctaaatctcgttgtaataaatcgtctaaaaccgcttcatcttgtgtaaaatccatttcattcaatacagcatgaatggtttccatttcaaaccctttttgaattaaagattgcattactttttctttaactttattttgtggccctttttttgttttagatattttttcagcaatttggataatatcatcaagttcctgttgttctctataaagttctgtaaatatttcaatgatatttggttctataccaagttgatatagtttttgttgataaattttaggtcctttatctgtcgtgcgaatcattgtattttttaaactttccgcataatcttgatggtcgattaacttttcgcgataacaatattcaatcacttcagaaatcgcttgctctgatatctcttctttttgtaaatattgtataacttctttttcagttctctttttatatgataaatattggattgctttatttaaacctatgcgataatgatcatacttttgaatctctgccatgtcagcagcttcaagttgttgccctttttttaaattaaatttgactaatgtatcaatatctatacccatttcaaattgttcgtctaaaaaaagattaaaccgttctttgtttttcttttgaacttctattttagtaatcttcggcactggatcaccccgttactttcttaagttttaatacaatactcttttattattcaataagccacttcctatagcaaatgtttaactttaaatatttttcgatgctaacaaaaaatcacactatcatcttttaaaatgaaagtgtgattacaagcaaatctgtaaaatttataaagcagaaacaattcaactttatcattatgacatttcaattaaaccttctacattatagttccaagcatcttacacatgaatgcaagtatttaacgatttaattgtgacatagcctgttgatattgtgtttcattgatataattttgttgcttcattttttctaagttcgtgcttacacgttgcgtaaaattctctgacatattattgatattatatacgctaggtgcattgactttactagctaaaatagcgctttgtaaaactgttatgtgagacattgttgtactatttttattcacggttgttccaaagtaatggtttgctgcgccctcaagcgtatattgattatccccaaagtaaatattatttaaataaaagcttaaaatttcgttcttattatattgtttttcaactcgatgagctacaaataattcttttacttttctagtaaatgaacgatcattatcataaaaataatttttgacaacttgttgtgtaatggtactaccaccttgcacatctctgtcgctaatcgttgaaaataaagctctagttgtacctttcaaatcgaatccatgatgattgtagaatcgttcatcttccattgaaataaaggcacctttaacatactctggcatgttatcagctgacacaaaactacttttattttcaatttttcttagttcatccacattatcgcgtgtagataaaaaatacatgataccaataaacaatgcgataatgattagaatggttaataatatttttaatagtattcgtttactttttttctttttcggcggtttgccaactggttgataatacgtattatagtgaggttcgtgtttcatatgctcaaaatgttcatttgagtttgagtacctatcgcttcttttcatgcgtttgctccttcttttaaaactcacttagtatataccttgagtttaccagtactatcacaaataggctacactttttgggaaaatcagtccaagggcttacaatcgtatacgccatcatacttacttttttgttttttgaaaaaattatagataaatcattgcaattttaaatattaatcatgtcaaatattgttatattttataaaaataaaagaccatccctattaaatgccaatagagacgaccttttatttgttattcatttattaaaactaaaatccatatttcatttcaaacgaaaatatataaattttaacaatcgataaccacaatacttctattgtaattgtttaacgatttctcgattaaaatcatctaaatcgtctggtactcgacttgttacaatattgttgtctacaactactgactcatcaactacatgtgcgcctgcatttgataaatctttgcgtacatttaatactgctgttaacgtacgaccttttaaatcgtctgtatctattagtatttgtggcccatgacaaatggcaaatgttggtacatcatttttagtaaagtatttagcaaatgtgccatatcgaccttctgtatctccacgtaaatgatctggtgaaaatcctccaggaattaataatgcatcataatcttctggtttagcttctgcaatgcctacatcgacagtaactttttcaccgtgtttaccaacaacttcactatttgcagtatctccaatcactacagtattaaagcctgcattctctaatgcctctttagggcttgaatattctatatcttcaaattcgtttgctagaataattgctacttttttagtcattgaaaatcacctttctatatatcattgatataattactatagacaagtaaatcagtgattaaacatacaagatataaaaaatattaagcgactgtcgcgatatctaaccctaacacatcttatgtggcatttacttagatactaatttaaccttttcttcaagctgatctaacaatccaatccattcatctatatcttcaacacgtacttcatcaggatttacatgatcgatatcctcaataaacttatttaaacgcgcttttatctgttcgattgtttgttgttcattcataaaaagttaactccttttattttgttttctttttcattattatcctaacagaaattgcgttaaagcgatataatcttagctatatttatgacattcaaattattttgacttttaaaaatccccttttcaattaactaaaattaagagataatttgttacgagtgataatacgaagtggtatcataccgatatgaaccaaatagaaagaaggaagtttaagacgatgaatagcgtcaaattgaagcaacctgttagcatttacaatgatccatgggaagcatataacgatgttaaagaacatggccaattaactttaagtaacatcgaatttacaactacaaatctttgtaatatgcgttgtagccactgtgcagttggttatactttacaaactgtcgaccccgagcctttagatatggacttaatttatcgtagacttgatgaaattccaaatctgcgaacgatgtctattacaggtggcgaaccaatgttttctaaaaagtctattagaaatgttgttaaacctctattaaagtatgcacatcatcgaggtatatatacacaaatgaattcaaacctaacattgcctcaagatcgttatttagatattgctgaatatatcgatgttatgcatatctcacacaactggggaacaactgatgaattcgcaaatgttggctttggcgcaatgaagaagcaaccaccgttaaaagctaagttaaaattatatgaacaaatgatttcgaatgcacgtacattatcagaacaaggaatgtttgtatctgcggaaacaatgctcaatcaaagtacgctaccacatttacgaaaaatacatcaagaagtcgttcatgatatgaaatgtagcagacacgagattcaccctatgtatccagctgactttgcaagtcaattaaatgtgttaactctagcggaaatgaaaaagacaattcatgatatattggatttcagagatgaagatatttggatgttatttggtactttgcctgtgtttccatgcttaaaggatgatgaagatcaaaagttactatcacgtttaagaaatgctaaaaatgtaacgactagaaatgacccggatggccgtagtcgtttaaatgtcaatgtatttacaggtaatgtaatcgtaactgatttcggagatgaaacaggtacaatttcgaatatacaaaaagataaattaacagatgtatttgataaatggttatcctctgatcttgctaaatcattaaattgtcattgttccgagtttagttgtttaggaccaaatgttcttgttaaaaatatgtactatccgaatatggattttaaagataatgagcgtcatatgcacaaacaaccacaaattatacaattttaaaaactcttaattatgcggagaagcactttatcgataagtagtctccgcatattttaatgctattataaaataaaaaacaattaattgctggcagtactctacttaaataataaagggcatttaataggactaatagtctataataaaaggggtaaattttaactaaaagcataaacgtgcataatcaaaaagacagattgtaggtggaatattcgaacataacagttcaattcatccttaacaatctgtctttatatttttagtctctaatatgttgcacttgagctaaatattcaattgtttgtttactttcaatgcgacgtgcttttcttcgttcaacacgttgtggtgctgtatcataaaaccatttttcaacatcatcttctggatatacaccaggtacatgtttaggtttgccttcatcatctaacgcaacaaatgttaagtaacttaatgcagctaaatcatgcttgttattaaatacatcgtcaattctaatttgaacgaccacttccattgaactagtcccagcgtatgaaaccatcgctacgtattgtaatatgtcccctgttttaatcggctttaagaaatctactgagtctgtagatgcggtaactacttgcgcaccagcatgtttcatagctgtgattgctgcaatttcatcaatattagccatcaatgtaccaccaaacattgtatgatggtgattcgtatcttgagggaaaacttgtctatttttataacattttgattctgacatagatttcattggtctgtcctgatttgtcattattttatctcccaatctatactttaatcacgtatttgacctttaaatacatgtttcatttcctactcagcacctcaaaataacatttattaaaatgttgatgcccaatttccattttcaaatactagttcttttgaaccatcttcgaatatgccataaatagtcaaatcactactaccaatcatgaaatcgacatgtacatttgaatcatttaatccgcttgcaatcttttcctcaacagtcatttccgttccaccttgaatattaaaggcgtaagcagatccaatcgctaaatgacatgctgcattttcatcaaataaagtattgtaaaaaatggtattacgatttgatatcggtgaatcatcaggtactaatgctacttcacctaatcttcttgaaccttcatcagtattgattaaatctttcaataccgcttcaccttttccagctgaaaaatcaataatctctccatctttaaacatcaatttaaattgatcgataattgtgccattataacttaaaggcaatttattagtaacatatccatctactctatttcgatctggtgctgtaaatacttcttcagttggtatattagcaataaaagcttgttccttgccgttaacataacttgtagcatcttcccagatatgatttttcgctaaacctactgttaaatcagtaccttcagatacataatgcaacgcatggtaatttttttgttgtaacttttgagcgtaaacacttaaattagcgatgtgttgacgccaattttcaactggatcgttaccatcaattcgcacaatatcgaatacctcgtcaataaacttaatatatgcttcttctacagatagttcaggatacactctcttcgcccaagctttagatggaaaagcagctacgacccatggaaattgatttttttgtacactttccatatatcctttaaatgcgcgtgcgttttgttgttgaaatgcttgtaatttttggctatcgataccatccattaaatcaggatcttcactaataagtgctaaattagcagcgccacgtttaacgtaatccattctcgcttcaacatcatatgattttatctcatgattagcaaaatgttccacagattcattttcaaattttaagcgttttaaggttggatcgctatatacaacacgtacatctgaagcgccacaatgatatgcttcttctacaattaaatgcgttaattctaatgtttctactgatgatctaataaatactggctgttttggttgaacattcataccaaccttaactaatagttcagcgtattgttgtaacttttctttgtaattagtcaaaattcccactcctattcgtgtcgcaattgtcctaaagcgtcagcaatagctgtcacttcacttggcgacaatctttctcttgattgaacaaaatcatatatatctgttaattcttcttcatttgcatttttatatttttcaggatctaataatccttgattaacaatatttaacttctctctaatagctaatactttctcttcatttgtcatagccacaatgttcacctctaataatagttatgttatcaaagtatcacaatttaataaactttaatagaattttatataatctgctttcttattgtttaaagtcgctataaaatggggatataactacatagtttggaggaatcaaaatggtagatgtagcatttgtctgtcttggcaatatatgtcgttctccaatggcagaagcaatcatgcgacaaagacttaaagacagaaatattcatgatattaaagtacattcaagaggtactggtagctggaatttaggagagccacctcatgaaggtacacaaaaaattctcaacaaacacaatattccatttgatggcatgattagtgaattattcgaagcgacagatgattttgattacattgtggctatggatcaaagtaacgttgataatattaaatctatcaatcctaatcttaagggacaattgttcaaactgttagaatttagtaatatggaagagagtgatgtaccagatccatactacacgaataattttgaaggtgtatacgacatggtattatcatcttgtgataatttaatagactacatcgtaaaagatgcaaatttgaaagaggggtagttttttatggaaaataaatttgttcctggtattttaattggtgccgtaattggtggtgcaattagtttagctgataaatctacacgtcaagctttagttcaatcagttaaagatgcaaaaaatggtaaccgcactcgtaagccttctaaagtcagcaagattaaagacgaagttttatactggaaagatgttgttgaagaaattcgtcgtaataatcctgaattagaacgttcattaaaggatgcgaaagaaacatttgttaatagaaaaaatcaacgctaagatgattttgtttttataaggcaatacttaacaatttggtgtacgcctttcatagttatcattattaaatgatgatacaatgattggccaaactgcattgtttcagtattgcctttgttttaattttaaatcaaaatagcctatgaaagatttaaatcaattaatttctataatattatcatttttaaagcatatcattgtttagtttttttataattggataaatactaatagttactttataaaacattacatagagaaaggttaaggagtgcacatgtcgaaaaaggatcactcttcttcaaaataccttaattctgttaaggaagcgcaagaggagtcaaaaaagaaaaataaaagtaatcccaaaattgatgttgatcgtacatatattgaacctcaacaattccaatctaagaaacctaaaaaagatgatcaggttttcttcttatcaagattaaataaacctgcaaaatataagaaagactctaatttcttatcatatctcatctatcgcataggaaaagatgatgcctcaggactagcagcacaaatgacttaccatttcgtacttgctatgttccctatgttgcttttcctattaacattattaccatttttcaatattaagcagagtcaaattactaatatgttaagcaatgcacccgctgaaacatctactctaattaagagtgtaattggtgatataactcaaaactccagtggtggcttattatctatcggtttgattttagcaatttggtcagcttcaaatggaatgactgcaattatgaattctttcaatgttgcttacgatgtagaagatagccgtaatggaatcgtattaaaactactaagtgttgtcttcactgtagttatgggcgttgtgtttgtagttgctctagcattaccaacgcttggttctgtaattagtcatttcctattcggtccacttggatttgacgaacaagtgaaatggatttttaaccttattagaattgtgttaccaatcattattatatttatcatatttatcgtgttatattcggttgcacctaacgttaaaacgaagcttaagtcagtattaccaggtgcagtatttacttcaattatttggttagctggttcatttggttttggttggtatatttcaaattttggtaactattctaaaacatatggcagtatcgcgggtatcatcattttgttactatggttatatatcacaagttttattataattgtcggtgctgaaatcaatgcaatcattcatcagcgtagtgtaattaaaggtaaaacacctgaagaagcagcattagaacatgatgacaataataaaaatcattataatgagaacactagatacgaatatgatgaagatagtaatgcaacacatcaacgtacgtatcatgttgatgaacatcctagtgatacctatccagaagatgataaaaatataaaagacaaaatcgttgataagcttaaaaaagactaaacaccaacaaaacagaggttttcgctaatgattattgcgaaaacctctgttttttggtgtctatttgatgttatattgtgattggcgtaagtaacttttcttaattcgatatgaactattgaattaaattatgttggaatgcatagataacagcttgtgttctatcttgcacttctaacttacttaaaatgttactcacatgtgtcttaaccgttttaatagtaatatgcgatgcactagcaatttcttgatttgagtaacctttcgcaatcaataataatatttccatttctcgttctgtaagcatttcatataactctgcgcgctttttcatacggttacgcattttcactaaaacttccggttcaaaaacagattctcctctagaagttttacgaactgcatcggcgatatcttttgcacttgttgtttttaaaatgtaactatcgacacctgcatctaatgcacgatatacctctttatcttcaataaaactagttaacattaatactttaatttgcggtaaatcttttttaatctgagtcgtcgcttctacaccatccatgtcatccataagtaaatccattaaaattaaatctggcttcaactcatgggctttggcaattgcttctttaccagaagcgccttcaccaactacttcaatatcactttgcgttgatagataacttgaaattcctatacgtaccatttcatgatcatccacaaacaatactttaatcgtcatacgaatcctccttatttaaaggtgctttcacctcgatacgtgtacctgaatctggcaatgatacaatatggaacgttgcaccaatttccaaagctctttcacgcatatttttaagtccataactttgttctaatttttcatcaacattaaaacctttaccattatcttgaattctcaacaataaataatcgtctttattaaacaattctactgtcacttttgtaccgtttgaatgacgcaatgtattcgaaattgcttcctgtgtaattctgaacaaatgatcttcaatacctttaggcactttaaaatcttgtatttcatgcacaactttcattggcacttttttttgtaaatcaataactaaatctttaataccctcacctaaagatttgtcttttaaaccaagcggtcttaaatgtaacagcaaagcacgcatttctaactgcgaatcttgaaccattttctctaaaataggaatttgttggtctaatggtggttctaacttcgtttctttgatagcagatagcatcatacttgccgcaaaaagttgctgactaacagaatcgtgaagttctcgtgctagtctttgacgttcatcttcaataatctttttaactttcacatcattaatattataattttcattggttaagttttgagttttaagtcgcaacttatgcaattcttgatttaaaggtacgagtgtatggtataaatctaacgtttcactatatatttctatattttgatcattaatgccaactgtttcgccttccattgaacgctcaatttgcgtcttaatccaatcattttgctgattgattttgtaagcgagtaccgaaccaacaataatacacaataatatgatgatgagatttaaaaataaaaaaactggtatttcgaatatttgtgtataaaacataccttgaaaatagatgatatttacaaaaactttatcgatgaacagaaatgcagctagcatgctatatactaagatgagcattgaaccaattgttctaatgtagtggttcatcgataaatcacctctacgtctccgataaacgttgatacgtagatattaactgtatagttatccggtttcatcatttcttcaatatgaatattgttattttcaactttatatgatttttcattcacgtaagtacttccataaaaagcagctacatgtaaattaatattgtaattaaccggcaatataacctgcactttacctaaaatgtgtctaacaacaatggtattattttccttaatatttgcagcttttgttaagtcaatatgtaggtcgccaattccatgttgaatttgtacatcttcccacttatatacataaactggtgtacgttgctcaccaaaccacttttgtttaataaaagatggtgaagtcataacctcatccgtcgcaactactttttttggtttaaacttgtgtattaaataacgcacaataagtaataataaaaagacgaacaagatgatgattgtatacttattagacaataatgtgaatgcaattaatagcgcgcctatccaaaacgccaaaaggccacgtattttatgaaaataaagatatcctacataaactaatacacatcccaataatagaacgagtaaaaagccaattttttcaaaaaatatgtagtaaaaattggcaataatcattaatgcagtaaaaatgatcaacatttgcgttgatatatatttgtgtgtcatgtttcgccgcctttctatgccacagcgttcatataatttattagatacgatgttttttctgttgctattttttcagttgaagtttgttgaatttgagtttcaatttgtgcataatatgcttcaactttattcaactctgatttaatattttcaatttcttgattattgatttctcttgcacattgaatttgaaatgcttcagcaatatcaatatatttattttctaatgttagcattagactgtcaattaacttgctaagttgttcttttttagtaattaaataacgcatataatcatctaaatttttcattttttcatctagcattaaaaggtagtgcttgatattatttcttactgttgctctcaaaaactgttcaatataacgttcaacatagttcataactatcaccttttataataagttttaaaataccaaatgcgctatgtatcttcgttgatgtcgatgatatgtttgcttaaaaactactttgttacaacatatttttgaaatgacgcattgattgtgttcttaattattataaaacagttccgaaaccaatatgaataggctccggaactaaatgatgttcatactttagtcttagtatatgttgaactattcttcttcaatctttgtcgttaaaatcggaccatccttagtcacgataaccgtatgctcaatttgagcaacaaaacttttatcgctcgtttcaaaagcccattcatttttaccttctgtaacaaatgatgcatttgatgagataaacggttcaatagctaataccataccttcagttaataatgttttgtcttttggatcaaagtaattaagtacatgtgctggtgcttcatgtaatgataaaccaacaccatgacctgttaagtttttaatgactttcaaatcattttgtctagctgtattatgcaccgctttaccaatgttacttaacttagtacccggttttacttttgcaattgcattctcaaatgccatcgttgctacgtcacatactttttgtttcattggatcatctgattctccaacgacaaatgaaatgcctgtatctgcataatagccattcttcaaagccgatacatcaatatttactaaatctccttcacgaatgacacgcttacttggaatcccatgtgccacctcttcattgacactaatacacgtttgaccaggaaaattttcatcatgaattggcgcagaaatagcaccgtattcttcaaataactctttcgcaatattatcaagctctttcgtagtgatacctggtttggttgcagcttgcattgtattgcgcactttagcgcatatgtatccaatttcttttaacgcttgtaattcttcttctgtttttacaatcattttatcccgttccttttttatataattataacttattatagcaaaaattctttgatatactaaagatgttactttagtattttggaaagtgagtgagacatagtgtgataaagaaaaaatatttctttatcgttgtaccccaacttgcattgcctgtagaaattgtagatccaatttctctatgttggggccccgccaacctgcacattatcgtaagctgacttttcgtcagcttctgtgttggggcccacaccccaacttgcacattattgtaagctgacttttcgtcagcttctgtgttggggccccgccaacctgcattgcctgtagaatttcttttttgaaattctctatgttggggccccggactataattgaaaaatgcttgttacaagtgcattttatttcagtcaactactaacaatataacattgtggagcccagaactttgattaatgtatatgaaaatcaaagtaatgcttatgtatgattatttcaaatattttacatacatgaacttttccaatgtacgatactattattataaagcgctcgctaagattttacgatgattagaggttaaaaaatgaacgatcaatggtataaacatttaattggtgccagaacaattaaaactggtattgccatttttttaacagctgtcttttgtatggcactagatttaacacccatctatgccattttaacagctgtagtcacaattgaaccaactgccaaggcatcacttattaaaggttatcgtagattacctgctacggtaattggtgcaggctttgcagtattatttacatatttattcggcgatcaatcaccttttacatatgcattgagtgcaacgttcacgattttattctgtacaaaactcaaattgcaagttggtacgaatgtcgctgtactaacatcattagctatgattccaggtattcatgatgcctacatattcaactttttgtctcgaacattgacagcaattattggactcgtgacatcaggtttaattaacttcatggtgtttccacctaagtattatggtcaggtcgaagaaaaattaagtaagacagatgccttgatgtataaattattttacaatcgctgccaagaacttatcttatcaagactgcaatctgataaaagcgaaaaagcatataaaaatattttcaatttaaataatcaagttgaaacgttaataagttatcaacgtgatgaattaagctatcataagaaaaaagaatgtgattggaaattactcaatcaattaactaaacgtgcatatacgaatcgtttgtttatcactcatttatcaaatatcatttacttgcctaaaaatactcgtgttaacttttcaggtgacgaaaaaatggcattgctaaaaattagtagtagcatcaaagatatattttatgatggttcttttaagagagaagatgattctgtagaaactttacgttcgactataaaagcacttgaaattagtggtgaaaatcaaattaaaagtcatatactatacgaagttctaatgatttatcgactgctagacagcagatatgcttaatttaagtaccttatgctaattggcaccatgggagtgggacagaaatgatattttcataaaatttatttcgtcgtcccaccccaactcgctttgcctgtagaatttcttttcgaaattctctgtgttggggcccacaccccaacttgcattgtctgtagaaattaggaatccaatttctctttgttggggcccacaccccaacttgcattgtctgtagaaattgggaatccaatttctctttgttggggcccctgactagaattgaaaaaagcttgttacaagcgcattttcgttcagtcaactactgccaatataacttcgtagagcatagaacattgatttatgtccccgcctctttttatcgtatatagcatgtccctttttaaaattacaagcataaatattcagactcaaatatagccacacgcctaaactacggagggatgtggctgtcttttttgattgtaattacatatcagatttaaatcattaatgtaaagaggctaattcattaataaatttagtaaaatctgatttagcaacatttatccttaatgaaataccagattctgttgccatgtttgaatgccttaaaccagaatcaaaatcaatataaatacaaagcagttcttgattaaaatcaataattgtaaaatgtaaatcaggttctataaaatatatttcagtaacaggattgtcgcaatccatatgtttcaaattgtccatgtcactatcaaagagtgcaaattcaaatttaacttcttgatcttcgaaagttgcactagtgtcgaaataataaattttattatcttcttcgataactacatcttttaaaataaatgttatcgatgttttgctatgtaaataagatgcatcttttaatatcactttagtaggcttcatcgtcaaattcctttcatcattcattttttcatgttgcataatcaccattactattgataattctaggatagatactcattgtataataattattcactagaacaaaaaaacacacatcaatttggttgtttccatccaaaataatgtgtgtgtttatacatatatgattaattactaaacttcatcgtttatcaatattaaatccattgatgcgatgttcagagttaacgagatttcttctgtctatttgctctgtctattaatacttgtttcgcttgtatttccgcttcattatctatttctttaggctcaaacggaatacccttacgttcacaagctttttctaacagataatcagtgatttcgtaatttttaggtaaaattggtccatgtaaataagtacctaataaatttttataatgaatgccttcttttttatcttcatcattattaccataaccaaaagtaacatgaccaagtgtaccgaaatcatgatatgttctaccaccgtgattttcaaaacctacaatagttccaaaagtatcactttcgataacaatatctcctgttaatcggtttgtctttgattcagtataaaaatctaaaatacctaacccttctaattctgtaccatcaggcgtgatatattttttccctaaaaattgatagcctccacaaatcgttaatcccggcataccatcttcaatcgcttctttaagtggtgtcttaattttacttaattcttttgttgctaatgcttgttctctatcacttccaccaccgataaagaaaatatcacattcatcaaaggtaataccttctgtttcattgatttctacgacattaactttaatatttcgttttttagcacgttgtcttaaagcaataatatttcctatatcactgtataaattcaatttatctgacataaaatgataaatagtcaattcatgcatattatgattgacctccttcaaacgaacggtttaattgttcaagcataggcgctaatgatgtatagtttggtattgcaactgtgaaacctttataatccatagtctttgccgttgctttataaatatcacgctcaactataattggtacttcaacctctgctaacttcaatcgcaattgaagttcttctgctcgtgtacctgtcacgatgatagcttcaatttgttgcttagataatttttcaaaatctgcatcataaatccatgaagtatctcgaccatctgcagcgttatcatttagcgaaataacatacactttttcgccttctaattgttcaccaactgataaacttgcattcattcctgcaggatttttagctaaattgatcatcgcttcttttcgttcttttttaaagtactgcatacgaccattgtctgatgtatacgtttcaaagccatttttaattgtttgttcatttaaccctagctctcttaaaacagtatatgctgctaacgcgttataagcgttaaagtcacctgcaattttcatatcatatttttcatcattgatatttaaatataaaaacggtgccacatcaaaacttgatatttcatattttgcttgctctcgtttgaaaccacactgacagtgataatgaccaatttgattataatgaatataatcgtattgcaataagcgaccacagtttggacaatatctactttcattcatcgtactttgttcaaattcatgggcatgtgctttcataccatagtacacaatcgtatcacttgcgattttcaaacgactcacaaatggatcatcagcatttagcaataatttgatgcctttattactaattgtctctgcaatgttattaaccataatatcaatttcaccgaagcgatccatttgatctctaaagaaattagtaaataccatcattgaaggtgtaacttcttttaacacacgtggaatcgaaccttcatcaatttcgattaccgcaattttagtcttaggtgttgattgcatgatgaatgcagaagttatacctgcagccatattagcaccttcattattgtgtataatttgaatattatttgcttttaaagtatgtccaattaagtttgaagtcgttgttttaccatttgttccactgataaatacaatatcatcaacttgctctgctaattttcttaatatatctgtatccacttttctagcgatttgtccaggtaaatctgttcctcttttacctactgctctacttgctttacgcgccaatttcgctagatggattgccgtccactgtctcatgtgtttcctcctcaaatttccactcgcatcattataacatgacaaggcaacttcaaaaaagtttctcaatcacaaattgatacagtgtttctaaattataatcattctcatttagataattaaaaatgatatttattctcaattaaatatcgctaaatgatacattttctcaattatagtgctaaaataaggcattaaattataattattattatttacaattgagaatgagtttgttatactaagtttaattcatagtaattttaatttacaaataagaggtgtatcaaaatgttaagtaaaaatttattagaagcattaaatgatcaaatgaaccatgagtactttgcagcacacgcatatatggcaatggcagcatactgtgataaagaatcgtacgaaggatttgcaaacttcttcattcaacaagctaaagaagaacgtttccatggacaaaagatttataactatattaacgacagaggtgcacatgcagaattcagagcagtttcagcaccaaaaattgacttttcaagcatactagaaactttcaaagacagcttatctcaagaacaagaagtaacaagacgtttctataacttatctgaaatcgctcgtcaagataaagattatgcaactatctcattcttaaactggttcttagatgaacaagtcgaagaagaatcaatgtttgaaactcacatcaattatttaactcgtatcggcgatgacagcaatgcattatatctttacgaaaaagaacttggcgctcgtacattcgacgaagaataattaaacatcactacaatagacagataaatatcatacgacatgataggcatttgggtcacttacaataacccaatgtctatattattttgctttacggagatcactagattcattttctgaatcattgatctgcgttttttcattttcaaggctaattattgtatttttagtcatttattttttaaactactaatgttaataactctaaatttgatgttgaattaatttgacgattttaaagcatatcatcatttactttttaatcagagttacatccaaatgatagatttcacgttataccttcacgtataatattatgtatcgtttgtaagcaaatgactaaaagtctattaatatatacatttaattaattgaaaggattgactacatgatacaagatgcgtttgttgcacttgattttgaaacagcaaatggtaaacgtacaagtatttgttctgtcggaatggttaaagtcattgatagtcaaataacagaaacatttcatactcttgtgaatccgcaagactatttttcacaacaaaatattaaaattcatggcatacaaccagaagatgttgaaaatgcacctacgtttgactacgtatttccatatatgatgcaatttattgcagatttacctgttgtcgcacataacgcggcatttgatatgaacgtcttacatcaaagcattcaaaatattggtttaccaactccaaatttaacttacttttgtagttatcaacttgctaaaagaaccgttgattcgtatcgatacggtttaaaacatatgatggagttttatcaattagattttcatggtcatcatgatgcattgaatgatgccaaagcatgcgcaatgattacttttaggctactgaaaaattatgaaaatttaacatatgtaactaatatttatggtaaaaatctaaaagataaaggctaggactaaataaaatactcccttcaaaagtaagcattgtaaaaatgtaaactttgcagggagctttattttatataaagtcatatatcgtcatatttttataagttgattgttctaaattacctacagtgacaccaataagtcgaattggtacatcagggtcttttaaatcgttataaagtaaatatgcaatattataaatatcttcttcagaactaaccgaatctcttaaactcatctgtttagatagcgtttcaaattgataagttttaattttaaccgttacagttttagctgacttctgtaatttatttagacgttcagctgttttacctgacaattcccatacttttcttaaaatctcttcatcatcattcacgtctgttgcaaatgtgcgttcagtccctactgattttcttactcttgatgatttcacttcactatggtcaataccgcgtgccttgttatataaaccccgacctctttttccaaacaaacgtattaattcaaattccgttttctcatataaatctctaccgttaaaaataccattatcatgcattacttttttggaagctttacctacgcctggaaaatctccaatatccaatgtcatcaaaatatcatggacattttgataatcaatcacagtcataccatcaggtttattcataccactcgctaatttagctaaaaatttgttataagaaacacctgcagatgctgttaaatgtgtctgctctagaatatcttttctaatatactgagcaattttcgaagcaggaaggtctggtctcactaattctgtaatatctaaatacgcttcatccaatgacatcggttctaccttatctgtataacttcggaaaatagacataatctgcgcagatgtttctcggtaagcaccaaaattacttgtgacaaagtatccatttggacataatttatgcgcttgtgacataggcattgctgaatggacgccgtattttcgtgcttcataggatgccgtagagacaacacccctactgcttgctttaccaccaacaatgactggtttccctttcaatttggggttatctctcatttcgacttgtgcaaaaaaatagtccatatctatatgaataattcgtctctcagtcaagtgctcacctccctactaatttttacttttataacgcacaaaaatatctcaacataattatacgctgtgtacgatttttttacataaatcttgcacttagcgataactatattgagataactacaagttgttataaaatcaattgctatttaagcatgatgatgaagacgattgagtaagaaaacataggtaatctgaaataattcaagcaaattcattttgttggtatcatcatattaaaatttattattgagtcggcttttgatgatacaaataaatactatcttcatcttgttgaacatatttaaaactactagatattgttaatgcaacaagcagaatatctataaagcaataagcggtatgcatactaaacataaaaataagtgatgaataaccaaataccttaattaaaataagcaagccagtacttaataggattagtggtgacagcataataattgagaattgccatttgttgaagcaagcatctgctgtttggaataagattctgtctttttttatattaaacataggtttgctatcttttttaaataaaagaaataatgctctatggataagttcatgtaaaatcaataaaataatgaatccagcaaacccatatacaagattgatgatgatattttgatcgacaaccgctgtgacacctaacgcccacttatacgtaaataaaatcacgaataacgcaataacaagttgcaagataataaaccttcgcatttgaaaattatttgtcgttaaatcaattttatgcattaccaaccctcccgatcatgacattcttattcttctttaaatatagtatacaatgtcacatttaatttaaaaagttcatatcaagaaagtaaattggctgtaataaaattttaatatacgacttctttcttcacttattaaggcgaaattttatctcaaatcatgtgcgctatttcaaattgaataatgccactgtctcaacatgtgttgtttgtggaaacatatctaccggtgttacctcttcaagttgatatttttcagctaataataatgcatcacgttgctgtgttgcgggattacatgaaatatagacaatacgcttaggttctaatgtaagcaaagtctgaataaacgtttcgtcacagccctttcttggcggatcaaccattacaacatctggtttaatcccttgtgctttccattgtaaaataacttcttcagctttcccacagacaaaagttgtattattgcattggtttatagtcgcattttgttgtgcgtcttcaattgcagaaggtactacttcaacaccgtatacatgttttgcaagtggtgccatatatagccctattgttccaataccacaataggtatctaatacaacttcattacctgtcaattgcgcatactcaattgctttattatataatttctctgtttgttcagaattaatttggtagaatgactgatcacttattttaaatgtactatctgttaattgatcaataattgtatctttaccatatagcgttatagattgacgtcccataataacattagagtggctatcattaatgttttgtttaatgcttgtcacattaggaaatgcatctaatatcttctcaacaacagcatttttttgtggccactttttaccattagttacaaaaataatcatcatttcgtctgtatgatatcctgttcttacaaccaaatgtctcattaaaccttttttcaattgttcttgataaatacttacatttaaatcttttaaaatagatttaacttcattcatcacttcttgatgttgtgaatcttgtattaaacaactttccatgtcaataatgtcatggcttctttgacgataaaagcccataataacttcattctgttcattcttaccaactggaatctgggacttgtttcgatatctccaaggatctgtcatgccaactgtatcgttaatcttagaattatcaaaatgcgcttttcgctgaaacaaattaatcacttgttcctttttcatttcaagttgtgcttcgtatgataagtgttgaagttggcacccaccacaacgttcataatatatacatggcggtgcaacacgattctcacttctcgtatttatattaagcaacttacctatcgcaaagttcttttttactttgataattttatattcaatttgttcattaattaaagcttgtggtatgaaaataggaaagcgatctatttttacgacaccatggccttcatgcgttaaatcaacaactgttcccgtttttatgtcatttttagctattgcttgcaaaattttacctccaaaatgaacaggttaggaacaaaattatgcgcttcctaacctgccattatatatttcactatttctgtttattcttcgattaaattgtcatcaacatgatcattatttattaactcttcatttacaatatcattaggtgcaaagacatctatatgacgttctagatttaagaaattcgctggtaatttaccaccatattctccatctacatttagttgtaagtctgtgaatgatgaaatattaattgcctttgctttttcataaataactttaggatgcttagtatgttctcctcttgaagctaaagtcataatatgaccaagttctgcaaggtttgatttttcaactataattaacgtaaaatagccgtcatctaacttagcgtccggcactaatttttcaaatcctgccattgaatttgttaaacctaaaaagaataataatgcttctccttggaaaacattaccatcatattcaattcttaaatctacagctttcatttgaggtaacatttcgaaacctttgatgtaataagcaaatggaccaacaatagatttcaatttactcggtgtttcataagagacttgcgtcaattgtccgcctgcagctaaattaataaagtatcgattattcattttaccaatatctactttagtagaatgaccttcaatgatgacatcaagtgcccccatgatgtcattaggtatatgcaatgcacgtccaaagtcattaacagtacccataggaatgacacctagcttaggacgattaggcttttctgcgataccattaactacttcatttaatgttccatcaccacctgcagcgattaatacatcataattttcatgcatagctctttctgcttcaagtgtggcatcacctattttctcggttgcatatgcactcgtttcatatcccgctttttctaattttattaaggcatcaggtaattctcttttaaatagctctttacctgatgtcgggttataaatgattctagcacgtttcctcatatcttatccctctacttaaaattcatatattttaacttcatctttgtttcgtctaatagggagtgggacagaaataatatttaacaaaatttatttcgttctaccccaacttgcattgtctgtagaatttcctttcgaaattctctatgttggggccccaccccaacttgcacattattgtaagctgacagaaagtcagcttctttgtttgggggccccgccaacttgcacattattgtaagctgacagaaagtcagcttctatgttggggccccactagaattgaaaaaagcttgttacaagcgtattttctttcagtcaactacagccaatataacattgtagtgcctaggacattgaatttatgacccaggctcagtcttatttcatcattcttaatatcgttaaagaccaacttgtatcttaaacaaatactatctcaatatgtacaaagcttgttatttattcagcattttttgccgttcttcattatatagacttcgtcagttatgctattttacctttaaaatgatgttgtaaatataatgttgtctttatacaaaaatgttttatacctttttattatacagtttgccttaatataattaaagctaacgcattaataaaattaatatttttaccattaacatgtacaatgaataaagttaaaagtaatttgacttctatagatataaataaaccctcgattgcatctaagtcagcaatcaagggtttattttttaaatcttcatagtttgatgatttaaattatcttttatctaattcttgttttaatagttgatttactaattgtggattagcttgacctttagacgctttcataatttgaccaactaagaagcccatagctttgcctttaccatttttgtaatcttcaactgattgttcgttattgtctaatgcttcatttacaaattttagaagtgttgcttcatcagaaatttgaactaagccattatcttccataatctgtttagcattaccacctttagctgctaactctgggaagactttcttcgcaattttactgctcattgttccgtcttcgataagtttaatcatacctgctaaattttctggtgttaatttagtatctaataattctacttgatttttatttaaatattcgtttacgccacccattaaccagttagatgttaatttaacatctgcaccgtgttcaattgttgattcaaagaaatctgacatttctttagtcaatgttaatacgtgtgcatcgtatgcaggtaaacctaattcatttacatacttagctttacgttcatctggtaattcaggaattgtctgacgaacacgctctttccaagcatcatcaatatataaaggtacaatgtcaggctctgggaagtaacggtaatcatcagaaccttctttaacacgcattaaaattgttttacctgtagattcatcaaatcgacgtgtttcttgtccgatttctccaccatttaacaattcttcttcttggcgtttttcttcatattctaaacctttacgtacatagttaaatgagtttaagtttttcaattcggctttagtaccaaatttttcttgaccatatggacgtaaagagatgttagcatcacaacgtaaagatccctcttccatcttaacgtctgatacaccagtgtattgaataattgaacgcaatttttctaaatatgcatatgcttctttaggtgaacgaatatctggttcagatacgatttcaattagcggtgtaccttgacggttcaagtcaactaatgaatactcacctttatgtgttgacttaccagcatcttcttccatgtgaagacgagtaataccgattcgttttgtttcaccgtcgacttcgatatcgatatatccattttcaccaattggttgatcaaattgagaaatttgatatgcttttggattatctggatagaaatagttcttacggtcaaacttagattctgttgcgatttccatatttagtgccattgcagcacgcattgcccagtctactgcacgcttattaacaactggtaagacacctggatatgctaagtcgataacatttgtatttgagttaggttctgctccaaaatgcgctggtgatggagaaaacatttttgagtccgtttttaactctacgtgaacttcaagtcctataactgtttcaaaatgcatgatttccactccttataatttttcataaacgtcatgtaaattgtattgtgtttcatattgataagcgacacgatataacgttttttcatcgaatggtttaccaatgaactgtaaaccgattggtcggccatttgattgtccacaaggaacagaaataccaggtaatccagctaagtttactggtgttgttaataaatcattggcatacattgttaatggatcatcaatttcttcacctaaattaaacgcagttgtaggcgctgttggaccaactactacatcataattttcgaatactttatcaaagtcatttttaatcaatgttctaactttttgagattttttatagtaagcatcatagtaacctgaacttaatgcaaatgtacctaagaaaatacgacgttttacttctttaccgaaaccttcagatcttgacattttatataattcttctaatgaatgagcttctttagaatgataaccataacgaattccgtcaaaacgagaaaggtttgacgaagcttctgatgatgcaatcacgtaatatgatggaataccaaatttagtatttggcaatgatacttcctcaacgacagcacctaaagattttaaagtttctacagcgttttgaactgcttcttttacgtcatcagctacaccttcacctaagtattctttaggtaatgcaacttttaatcctttaatatctttaccaatttcagatgtaaagtctacatcatcaactggtgcacttgtagagtcattaacatctgcaccagaaatagcttctaatacgattgcattatcttttacatttcgagtcaatggaccaatttggtctaatgaagatgcaaaagcaactaatccaaatcgagatacacgaccgtatgttggtttcataccgacaacgccacaatatgcagccggttgtctaattgaaccacctgtgtctgaacctaagctaaatggtactaagccagctgcaactgctgctgcagatccacctgatgaaccacctggcactgctttatggtcaaatgggttaactgtttttttgaaataagatgtttctgttgaaccacccattgcaaactcatccatatttaatttaccgattaaaacggcattttcattatgtagtttttccattacagtagattcgtaaattggcacaaaaccttctaacattttacttgcacatgttgtttctaatccgtttgtaataatgttatcttttatacccattggaataccaaataatttgccatccatttgatcttttgcttgtaattcatccaattcttgcgcttttttgattgcattttctttatccagcgctagaaaagacttaattgttggatcagtctcttcaattgcatcatatatatctttaacaacatcagatggtttgatttttttgtcttttattaaagttaataaattctcaaccgattcgtagcgaatgctcatcttacgcgtcctcctcattcatgattgtaggcactttaaattgtccatcttctgtttctttggcatttttcaaagctaattcttgtggaatacctttaattgctttatcttcacgtaaaacgttttgtaaatctaaaacgtgatatgtaggttcaacgccttctgtatcagcgctatcattttgttttgcaaaatctaaaatgctttctaatgtgttggccatttcttccgtttcttcaggagaaatttgaagtcttgcaagattcgcgatatgctcaacttcttcacgtgttacttttgtcattaataaaagcctcctttaagtcattcatcactaaattgtatcaaatttccaattaaaaatctaagtatttatgaggtgctactttaatttcatataaactgtataaacattatcattcgtttatcaaatcattttttatgaaaacaacactcttttaatattagacaacccaattcaatattatgattatgcaattttaattataaaaatttgctcatatccaaaaatacgaaagcgctttctatattggtatgcaagtatttcaaaaagaataaatttaattttcctacttttctaaacatttatctttatgtataatgttttcaagtaactaaattataaattaaataaagggagtgtttatcatgcttacaatggggacagcattaagtcaacaagtagatgccaattggcaaacttatattatgattgccgtctacttcttgatactaatcgttattggcttttacggttacaagcaagcaactggtaacctaagcgagtacatgttaggtggacgtagtattggaccgtatattactgcattatcagctggagcttcagatatgagtggatggatgattatggggctacctggttctgtctatagcactggtctatcagctatgtggattacaatcggtttaacattaggtgcttatataaattactttgttgttgctcctagacttcgtgtttataccgaattagctggagatgcaattacattaccagatttctttaaaaatcgtttaaacgataaaaataatgtgttaaagattatttctggattgattatcgtagtattctttacattatatacacattctggtttcgtatctggtggtaaactatttgaaagtgcttttggattagattatcatttcggtttaatattagttgctttcattgtcattttctatactttctttggtggatatttagctgtatcaattacagatttcttccaaggtgtcattatgttaattgcgatggttatggtccctattgttgctatgatgaatttaaacggctggggaacgtttcatgatgtagcagctatgaaacctacaaatttaaatttatttaaagggttatcatttataggaattatctctctattttcatggggattaggttatttcggtcaacctcatatcattataaggtttatgtctattaaatcacacaagatgctacctaaagctagacgtttaggtattagctggatggctgttggtttattaggcgctgtggctgttggtttaacaggtattgcattcgtacctgcttatcatattaaactagaagatcctgagacattattcatcgtgatgagtcaagtactcttccatcctcttgtaggtggtttcttacttgctgcgattctagctgcaattatgagcacgatttcttcacaattacttgtaacatctagttcactaacggaagacttttataaattaattcgtggtgaagaaaaagctaaaacgcaccaaaaagaatttgttatgattggaagattatctgtattagttgtagcaattgttgccatcgcgattgcatggaatccaaacgacacaattctaaacttagtaggtaacgcttgggccggatttggtgcatcgttcagtccacttgtgctatttgcactttactggaaaggtttgacacgtgccggtgctgtaagtggaatggtttcaggtgccttagtcgttatcgtttggattgcgtggattaaaccattggcacatatcaacgaaatattcggcttatatgaaattattcctggatttattgtaagtgtaatcgttacatatgttgtaagtaaacttactaaaaaacctggtgcatttgttgaaactgacttaaacaaagttcgtgacatcgttagagaaaaataattcataagtcttaacaaattaaaaaggtactaatgttaatcaaaattatgactaacattggtacctttttattatctttaatttacaattaattactgtaaatatgaacttgcggttctttgtcatcttttgtcttactaattaaagcacgtggttggttaccatctttaatacgaatttcatagttatcgattttatcgaaatatttattcgcttgttcagtaacgtactgtgtaataccaattgtttcagcttgtccatagtaatcgattggtaaatctactactaatcgttgtggctttttatcaacaaatttaactttccctactgcttgtgtgaaattagaaaaatatgattgcaaattatcattaaattgcttgaaattattatttaaattttcatcataatctgctgctgttgaagaaggtaataaagctgatttttcattgatattatgccattcattaagctttgtttgactcttttctgcagtcgcttgagtgataaattcacctggtgtgattgaatcttcacttgattgcttataaattgcaaaatgaattggtatatcttttaaatcatcattttcacgtaaccttgataatatctcactagccatttgtttaccttgctttttaacttcgctatcatctagttttttactaaaagtcgatccatctttttcttttttatagtaataaacactattcatagctaaaccaatcgtcatacctttaatattcttaccttttgtatctccaccaccataaaaatcttgctctaaaatgttagataaataggctggtgatttttctgcaatcttttcaggatctgtttcaccttcgtgtgatggattaagtcctaaattttcattcgctttcttgtcttttttatctttttcagacattttatcgatttcacgttttgtatacttaggatttaaataggcattaattgttttcttgtccaaaaattgaccatcttgatacaaatatttatctgttggaaatacttctttacttaagttcaataaaccatcttcaaagtcgccgccattataactatttgccatgttatcttgtaaaagtcctcttgcctggctttctttaaatggtaacaatgtacgatagttatcaccttgtacatttttatccgttgcaatttcttttacttgatttgaactattgttatgtttttgattatcttttccagcctggtcatccttatggttaccacaagcagcgagtataaagatagctgtaatcaataatactaatgtacgcttcatcgacatacccctctaactatttaattcattttgcttatctacaaattgttgctctgtccaaatttcaatacctaaactttgtgcttttgttaattttgaacctgcatcttcaccagcaataacgacatctgtatttttagtaacgctacttgtaactttagcaccttgtgatgcaagccatttagatgcttcattgcgtgtcatttgatgtagcttaccagtcagtactatcgttttaccactaaattcaggatgtccttcaatatctgatgttttgatacctttataaatcatattaacatgtttatcttttaatttttgaattaaagcacgaatatcttcattttctaaataagtaactacagattgtgctactttatcacctatatcatgaatttctactaattccgcttcagttaccgttagtaatcgatctatcgtttcatatttttctgctaacacttggctcgctttaacacctaaatgcctaatacctagaccaaataataaattttctaaagagttgtccttagcttgttgaatggcagctaataaattatcaacttttttctgccccattctgtctaaaggtaataaatcttcttctgttaaatagaaaatatcagcaacatctttaattaattcgctttgataaagctgttgaataattttagtgcctaaaccatcaatattcatggcttgtcttgatacaaagtgaatcaatccttcaacaagttgtgcttggcattttggattaatgcaacgaagtgctacttcgccttcaatacgtactaattcatgtccacaacttggacaatgggttggcatatgatatgtgacagcatcctcaggtctacgttctggaatactacgtacaacttcaggtatgatgtcacctgcttttttcactacaacactatcaccaattcgaatatctctgtcatgaattaaatcctcattgtgcaaagatgctcttgatacagttgtaccagctacttttactggttctaaaatagcagtaggtgtgactacacctgttcgtccaatacttaattcaatatctaataatttagttactacttcctcagctggaaatttataagcaatggcccatctaggagatttttgtgtgaatcccatctcatcctgttgatctaaatcattaaccttaataacaatcccatcaatatcataaggtaatgactctctttggcttgtccatttttcaatatactctaaaacaccatcgatattatttacacgcgctctatttttattcgttgtaaaacctaatttatctaactcatctaatgcttcactttgcgaacgcgcattgaaatcagtgaaatcattgacactatatataaatacgcttagctttcgttttgccgttaatttagaatctaactgtcttaatgatcccgcagcagcgtttcttggatttgcaaataactgctcatcatttttttctttttcttcatttaatcgtaaaaatgaacgtctcggcatatatgcttcaccacgaacttctacatttaatggttctttcattttcaaaggtatcgcatgaattgtttttaaattttcggtaatatcttcacctgttgttccatcaccacgtgttaaaccttgaacgaagtatccatcaacatatttcaatgatactgctaagccatcaatttttaattcgcacatatattcaacgttgccaatttgttcacgtatgcgttggtcgaattttctcaaatcatcctcattaaatgcattccctaaacttaacattggcgtgtcatggttgactttattgaaagaggcttgggcttcaccgccaactctaactgttggagaatctacagtcttatactcaggatgctcctcttctattttaatcagttcatgaagtaatttgtcatattcactatctggtacagatggattatcctctacatagtattcataactgtattgatttaataaatcatgtaactcgttcacacgagacgataaatcagccatcccttaatcctcctttttttcaattggtgcaaattgcgctaacaaacgttttggcccttgtgatttaaagataatatctagttcgattgagccatttttctcgtttacattactcaccatgccttctccccaggctttatgcatcactttgtcacctacattccaatcagatgacaatacttgttttttcgttgacgttgttcgttgactaaatccgcgtttagcaaaaggttttgccttaggttgtatcgtttgtcgtttgccacttgaatgattttctaatagtgattctggaatttcctttaaaaatctggatggcatatttgactgagggcgaccaaataacattcttgatgtcgcatgagtgatatataacacctcttcagcccttgtaattgctacataacaaatacgacgttcttcttgcatttcatgatcatcttcactcttaatcgctctaatatgtgggaataaagattcttccatccccattataaagacaattggaaattcaaggcccttagccgagtgcatcgtcattagtgttacgccattttcagtatctgcctcatcaatatcagctactaacgataaatccgttaaaaagttaattaatgactgttcttctaatggggtattttcctcatagtcttttggtactgacataaattcatcgatgttttctaatctacttcgagattctaatgtattttcacgttcaagcatttctcgatagccagacttttgtaatacttcatcaactatttcatgaatttctaaaaattcttgttcttttatcaagctttggattaactcgtaaaaattaagacactcttgtgtcaccttttttgacaatccgataaaatcagcttctccaagtgcatcaaacatactgatattgttttgaagtgcatagttttgtaactttttcaacagatgaaggacctacacctctttttggaacattaataatacgttgcaaactaatgtcatcattactattggcaattatacgcaaataacttaataaatctttgatttctttacggtcatagaacttttggccaccaaccattgtgtatggcatattagatttcatgaatgtttcctcaagtacacgtgattgtgcattcgttctatataaaattgccatatcttgatatttcttaccattacgttgatgcttcataatttctcgtattacaaattccgcttcatcacgttccgtcattgcttcatagtaatgaattttctcaccattcgtatttgcagtccacagtccttttggcttacgttcagaattatttttaatcacttcgttagccgcatttaaaatcgttttcgtcgaacgataattttgctctaaaaagattgtattcgcttctggatagtctttttcaaatgataagatattttgaatatcagcaccacgccaaccataaattgactgatctgagtcacctacaacacataagtttttaaacttacttgctaataatttaactaatgtgtattgtgctttattagtatcttgatactcatctacatgaatatattggaatttgttctgataatattctagaacttctggtacacgctcaaataagttaatcgttgtcataataaggtcatcaaaatctaacgcttcattacgtgacaattggcgttgatatccactataaaccgttgctaccatttgcgagtgataatctgtggcttctttttgagcatctgcaggtgttttaagttcatttttcaaattactgatcgcaccgataaacatacgaggttcaaactttttactatcaatattttcattttttaagacgtctttaataacagatttttggtctgtaggatcaattatcgtaaaattgcgttctataccaattcgatctgcatcacgacgtaaaatacgaacacacattgagtggaatgttgacatccaaataacttctgcttgatcacctactaatttttgaacacgttctttcatttctcttgcagctttatttgtaaaagtaatagccaaaacattgtatggtgagacatctttttcgtctaataaataagcaattctatgtgttaaaacacgtgtcttccctgaaccagcacctgccataattaacaatggtccttctgttgtctttacagcttcactttgctctgtattcatatgatttaataacgcattcatttactagactcctttatttttactgtttttaaagcttttttaatatctttataaataatatcaccgacgataattgtatctgcaatagctgccatctctgtcgcttgttgttctgaggaaataccgccaccataaaaaagttgcgtttctgttagatgttctgagacagcttgaacctttgatacgtcgccataaatgccactatactctatatacataaccggtaatcgatacatatgattgaccatttgggcatatgcttctaaatcttctgttgttaaatctgtatttgctttggtatgttttgccactttgctatcagcattgcacacgacatacccttcaaatattacttcctcaaaatctatactatgtccatatgttttaagcgcttctaataatgtaccattgtgaaatacaacatctgtactgttcagtactgtaggtacaaaataaaaatcaaaaccaggcattacactttcgatgtttgatatttcaagtactaaaggcaatgggtatcttcttactctgctcattaaatgaatgacattatcttcagtaacgtcatcagttccaccaatcataattgcatctgtttgagacatacaaatcgcatctaaatcatcatctgaaatatgtttagctgggtctaatttaaaaatatggcgccattttttaatgtcatacattttccgaaactccttttttaacatacatatgattatagcatttttaagtgtcgagttctaaagacttaatatgaaatttaagttcttttactctgtaaattttttcgtgaaaaaacaatgattatctaccttattagtgcagatagataaccattgtttatcgttcatttattattcatttgtttcaatattcatacgatctaaaatcattgtataagcatcattaccccattgtaatgaacgcttcactctagaaatcgttgcagtcgatgctccagattcttgttcaatcgttgcataggtataaccttgcttaatcattttagcaacttgtaatctttgagacagtgattgaatttcatttacagtacacaaatcatcgaaaaattggtaacattcttctctattttctaacgttagtattgcatcaaacaattcatctaacgctgcacctcgtaatttttcaatttgcatatcgaaacaacccctataattttattctttatgtcattttaacgcattaatctattaaagtgtagcgatttatattttattaaatctgaatcgttactttatttaattttatgctaatccagcgcgttcgaaaatagtgtcaacttgattcaaatgatgtttaggatcgaaacattcatccaattcttcttttgttaaaacacttgtaatagactcatcttgttcgattaattcacggaacggtgttttcgtttcccaagatatcatcgcttttggttgtactttgtcgtatgcttcttcacgaaccatacctttattaattaatgctaataagacacgttgtgagaaaatcagaccaaatgttttatctatgttattacgcatattatcttcaaatacagttaaacggtccacaatatttgtgaaacgattcaatgcataatctagtgctattgtaacatctggtaacataatacgctcagcagaagaatgagaaatatctctttcatgccataatggcacattctcataagctgtagtaatataaccacgaatgactcttgaaatacctgtgatattttcagaaccaattggatttcgtttatgaggcattgcagatgaacctttttggccttttgcaaatgcttcttcaacttctctcgtttcggttttttgaaggttacgtatttcaacggcaaatttttctagtgatgtcgcgattaatgctaatgtcgcaatatagtatgcatgtcgatcgcgttgcaatgtttgcgttgatacaggcgctgtgccaatacctaaatgtttacacacataactttctatttcaggaggaatgttagcaaaagtacctactgcaccactcattttccctacttcaatttcttctcttacttgtttgaaacgttgtaagttacgttgcatttccgtgtaccacaatgccattttgacaccaaatgtagttggttctgcatgcactccatgtgtacgtcccatcatcaatgtatatttataattttttgctttttcagctaaaacgtcgataaatctttctaaatctttttcaataatgtcatttgcttgtttaataacgaaacttaaagctgtatctacaacatcagtagaagttaaaccataatgtacccacttacgttcttcacctagcgtttcagaaacttgtctagtaaaggctacaacatcatggcgcgtttcttgttcaatttcttgtgcacgttcgacatttacctttgcgttttgacgaattttttgtacgtcagctttcggtatatgtcctaattcactccatgcttcacatgctaaaatttccacttctaaccatgcttcatagcgattttgatcagtccaaatattagacatttcttctctagaatagcgttcaatcatttttttaactcctatcgtatgtatactcgaattttcaaaaacagaacattttttaataaaaataaacaaaaagttcgtttttaactctactcttcacagtttaacagaattggttataaatgtataaaaaatttccgtatattctcattctattttattttttacattaatacaattatctatggcagattaatactgatttctaattgtaaatgttcgcaatactttaatctaattggtatttataatgatccattgagaatatatttttgcattttagtttttctcccctcaactacactatccaactttttattacaattaggacaatcaatagctttagtaataccagaatttattcactttacttctcctattgtatggaattttcaacaatctacttttcctagtttcataatatttcttcttacatttcataatatgttttaaaattattcgcttctaatataacaaattttctactcacaaaaagaatatatattctattgcataggtgtggcattttaaatataagacattaatattgaactccagaatcgtataaatacgaaactgattatagaaaaatacgcagagatttttttaatagtaaatttttatagaaagacataaattgactacgcttctttcaaaatcgactaatatattttcatgaaactttcgatcatattaattattgaatgagatgtttgcaatttagtaaataagctactaaattattacataaactgataatgtgtaaaaattaattattttttaaacatagattaaaattttatattgaaactcttaactaaatttaatataattattttataataaaataaaggagtttttatatgaaaagaaactttccaaaattaatagctttaagtttaatattttctttaagtgttacccctattgcaaacgctgagagcaattcaaatatcaaagcaaaagataagaagcatgtgcaagttaatgtcgaggacaagagtgttcctactgacgtacgtaatttagcgcaaaaagactatctttcttatgttacttcacttgataaaatctataataaagagaaagcctcgtatacacttggtgaaccttttaaaatttataaattcaacaaaaagagtgatggtaattattattttccagttttgaacactgaaggtaatatcgattatatagttacaatttcaccaaaaatcactaagtattctagttcatcttctaaatacacaatcaatgtttctccatttttatctaaagtcttaaatcaatataaagatcaacaaattactattttgacaaactcaaaaggttactatgtggttactcaaaatcataaagctaaactagtactaaaaacaccacgtctagaagataaaaagttaaaaaagactgagagtatacctactggcaataatgtaacgcaactaaagcaaaaagcttctgtcactatgccaactagtcaatttaaaagtaataattatacttacaacgagcaatatataaataaacttgagaatttcaagataagagaaactcaaggtaacaatggttggtgtgcaggctatacgatgtctgaattactaaatgcgacttataatactaacaaatatcatgcagaagctgtgatgagatttttacacccaaacttacaaggacaacgattccaatttactggtttaacgccaagagagatgatttattttggacaaactcagggaagaagtccacaacttcttaatagaatgactacatataatgaagttgacaatcttactaaaaataataaaggaattgctgttttaggtagtagagtagaatcaagaaatggtatgcacgcagggcatgccatggcagttgttgggaacgctaaattagataatggacaagaggttataattatatggaatccatgggataatggttttatgactcaagatgctaaaaacaatgttattccagtatccaatggcgaccattatcgatggtattcatctatttatggttattaaaatttgtattttagaaaggtaaataatattatggaacaaattgaattatttagtattgataaattcaaatgtaattcagaggctaagtattatcttaatattattgagggagaatggcatcctcaagatttaaatgatagtcctttaaaatttattctcagtacctcagacgattctgattacatttgcaaatatataaatacagaacacaaacaactcacattatataataaaaataatagctcaattgttattgaaatatttataccaaatgataataaaatactactaacaattatgaacacagaagctttgggaacttctcctagaatgactttcattaagcataagtcataagactatctagatatgattaagtaaactattaatcttattaaaggtctctaggaagaaaaaatttcatgcgatgagattgttttagaaaaagcgacgatatatataatctaacaataatttttaaaatattaagaacccccagcatatgctttatatagcttgctgggggtttctcatacaatatggatcgagcatcttgcatgtataaacaaataggctattcaaagtaaaattactcaaactttgaatagcctttcctcttcaaatagtctttatttaaattggattatgttattggattttcttacctacaaaaacgatttcttgatgtgatacttcaaccgtgccatctttttgctcttgaaacacgggtttttcaatacgttttaccggcatatacccttgcattttcattcgtgacaaacaatcagcaattgtttcattctcatttactttgaatttcatgttctactacactttccagttcttctggttcataatctttaagctttctacgacgaatgcctttagtccagaatccaccatgtatgtttcgaggttcatacgcaatgataaatgctttcggatctaaattttttatcgtatccatcaatttacgttcatattttcttggtgttaaaatttgcatcaccatacgactaccatctctaccaaacgcagcatagtgcgtaacgccatatcctaaatttcgaagttcattcggtaaatctaactcatattctgctgaagttacatttacaactgtataacctaatgccagtttttcttctattttcataccaacaatgatacctattgaaaaaccaaatgcgtaggcaataatattttgaatatggtctaaattagacataaccaaacctaaaccaacgatataaactaatacttctaaaaaactaactgatgcagcaatataacgataacctttcaacgttaaaattgttcgcatcgttaaaaacgttacataacaaacgttaatgataaatatagttagtaccattaaccatggattttctgttacgaatgacataaggcgctccactctctttcaattacactttaaataccaaactgcttcaacctaaccttaatgaatgcatattaatataatatagtacgaaaactctcataaataaatagcgaatttgtcataaataaaaatttattctcaaatgaacatacttactttagttcatacactttcaatttatacactgaagtagtctagctgaatgtggtttaatgttattaattctaactcatatttaatttaagtcacacgttagaagaaaaaattaaattaggattttggccacgtgtatcttgtatatgcaagttcacgtttgtgtgcatttcgtatataatgattttcaattactttttgttcttctggcgtaactggcttaccttctaaataattatcaatcgcctcataagttacacctaatgcatcttcatctggaagctgtggtttatcatcttctaaatcagcagttggcgttttttcatataattcctttggcgcaccaagatacgctaataattgacgaccttgtcgtttattcaaaccaaatataggtgcgatatctgcagcaccatcaccgtacttcgtataaaacccagttatattttcagctgaatgatctgttcctactacaataccttgtcggtttgaagcaattgaaaattgtactttcatacgttcacgcgctttttcatttcctttttggaaatctgtaagaacaataccggcttcttttaatgattgcacactttgatcaactgcaggcttaatattgactgttactatttcatctggttcaatgaatcgcaaagcttgctcaacttcatcagcatctttttgaactccataaggtaatttaactgcaataaacgtacaatcaatgccttcttcacgtaattcgttaacagacatttgtactagttttccaactaatgtagaatcctgtcctcctgaaatacctaacactaaagattttataaatgaatgtgattgtacataattttttataaattgctttaattccataatttcttcagcactatcgatacgctttttcactttcatttcttgtacaataacgtcttgtaatttactcattatcttcttccatctccttaacgtgttccgcaacttcaaaaatacgtttatgtttattatcccaacatgccttgcttaaatcgactggatattcttgtggattcaggaaacgcttattttcatcccaaatagattgtaatcctagtgctaaatattcacgtgattcatcttctgttggcatttgatatactaatttaccattttcataaatattatgatgcaaatcaatggcttcgaaagattttataaatttcattttataagtatgcactggatggaataattttaaaggttgttcatcgtatggattttcattttccaaagtaatataatcgccttctgccttacctgttttcttgtttataatgcgatatacatttttcttacctggcgtcgtaaccttttcagcgttatttgataatttaatacgatcactatatgaaccatcttcattttcaatagctacaagtttatatactgcacctaatgctggttgatcgtatcctgtaatcagctttgtaccaacgccccaagaatctacttttgcaccttgtgctttcaaactcgtaatcgtttcttcatccaaatcattagacgcgataattttagtttcagtaaatcctgcttcatcaagcatacgtcttgcctctttagataaataagcgatatctccagaatctaatcgaatacctacaaagttaattttgtcacctaattcttttgcaacttttattgcatttggcacgccagattttaaagtatggaatgtatctactaggaacacacaatttttatgtctttcagcatattttttgaaggcaacatattcgtctccataagtttggacaaatgcatgtgcatgtgtaccagacacaggtataccaaataatttccccgccctaacattacttgtagaatcaaagcccccgatgtaagcagctctagcgccccacaatgctgcatcaatttcttgcgcacgacgtgtaccaaactccattaatttatcatttgatgcaatttgacgaattctgctagcctttgttgtaattaatgtatggaaatttacaatgtttaataaaattgtttctattaattgcgcttgaatcaatggtgcttctacgcgtaacaatggttcgttaccaaagcataattcgccttcttgcatcgaacggatgctgcctgtgaattttaaatcttttaaatatgataagaaatcatccttgtagccaatagactttaaatattccaaatcagattctgaaaatccaaaatgttctataaaatcaatgacgcgttttaaaccattaaaaacagcatagccactattaaatggcatttttctaaaatacaaatcaaatacagccattttttcatgaatattatcattccaataactttcagccatatttatttgatataagtcattatgtaacattaaactgtcgtcttctaattggtacacttgtatctctccaatcgacctaaatattttcttacattttatcataattcatttttttatatacataagagccccttaatttccatacttttaattaaaatcaaccaacaatttaatgacatatacataatttttaagagtattttaataatgtagactataatataaagcgaggtgttgttaatgttatttaaagaggctcaagctttcatagaaaacatgtataaagagtgtcattatgaaacgcaaattatcaataaacgtttacatgacattgaactagaaataaaagaaactgggacatatacacatacagaagaagaacttatttatggtgctaaaatggcttggcgtaattcaaatcgttgcattggtcgtttattttgggattcgttaaatgtcattgatgcaagagatgttactgacgaagcatcgttcttatcatcaattacttatcatattacacaggctacaaatgaaggtaaattaaagccgtatattactatatatgctccaaaggatggacctaaaattttcaacaatcaattaattcgctatgctggctatgacaattgtggtgatcctgctgaaaaagaagttacacgcttagcaaatcacttaggttggaaaggaaaaggtactaattttgacgtgttaccactgatttaccaattacctaatgagtcagttaaattttacgaatatcctacttcattaattaaagaagtacctattgaacataatcattatccaaaattaagaaaattgaacttaaaatggtatgcagtccctatcatttccaatatggacttaaaaatcggtggcattgtatatccaactgcaccctttaacggttggtatatggtaactgaaattggcgtacgtaactttattgatgattaccgttacaatttactagaaaaagttgcagatgcgtttgaatttgatacacttaaaaataattcatttaataaagatcgagcacttgttgaattgaactatgctgtgtatcattcctttaaaaaagaaggcgtatcaattgtcgatcatttgaccgctgcaaagcaattcgaactattcgaacgtaacgaagcacaacaaggtcgtcaagttaccggaaaatggtcttggctagcaccgccattatctccaacattgacgtcaaattatcatcacggatatgacaatacagtaaaagatccaaactttttctataaaaagaaagaatcaaatgctaaccagtgccctttccatcattaagttagtagaggtgtagcatatgcaattatattatttaggccctaaaggtacattttcatatttggcttgtcgtcagtatttttctgaaaatgaagcaacttttcaaccaaagtcaaatttttttgaagtcatcaaggcagttgcagatgatgacacatcgattggtgttgtccctattgaaaattctatagaaggaacaatcaacattgtggcagatgcacttgcacagcaagatgtctttgcacacggtgaaatacgtttagatattaactttgcattatatggtaatggaacagattccatttctgatattaaaaaagtgtattctattgcaccagcaatcagtcaaacaacaaattacatacatcaacatcaatttgactatgattatgtcgacagtacaattcaaagtttgactaaaattgaaaatggcgttgcagcaattgcacctttaggtagtggcgaagcttatggttttacacctattgatacacatattgaagactatccacataacgtgacacgttttttagttataaaaaatcagcagcaatttgatcaaaatgcgacatcattgatgtttttaattacaccaatgcatgataaacctgggttgttagcaagtgtgcttaatacatttgctttgtttaatattaatttatcctggattgagtctcgtcctttaaaaacacaattaggtatgtatcgatttttcgttcaggctgattctgcaattacaaccgatataaagaaagtcattgctattttagaaaccttagatttcaaagtagaaatgattggtgcttttaattaaactttattttctaggttctacaatttaaataaaataaagagtcaaccaaggattaaaataggaatccatccttggttgactttcttttgtttgtattgtttttacacgatgctgcggtatacgtttcgttaccactcgtccaagcaattgctaatgtaaccttttatttttcgttctaatctgcaattactatttcaatggcagtggttgatttatatcaatacctaaaactataggcattacataatacacgactaaaataataattattgcactgattaagtttacccagaatcctactgatgccatttgtttgatagatattttaccagaaccaaagataattgcattcggtggtgtccctactggtaacatgtatgcacagttagccgccatagctgcaggtgccataagtagtaatggatgcactccaacagcaacagacaacgttgctaaaatcggtaaaatcatcgttgcagttgcagtattagatgtcacttcagttaaaaataagacaaagattgttatgacaattacaataagaatcggactaacaccatttaatgatttcaactgttcgcctaaccattttgctaaaccactttcagaaatacctttcgctaatgctaaaccgccaccaaataaaattaatacaccccaagggagctcttttgcaacttcccagtcaatgatacggcgatgtttttcagtatttttagctggaataataaataataatattgatataaaaatagcaatcgtaccatctgcaacagatgacgtaacttcccattttttcagaagaaactctcttgtaatccataataagctagcaagtacaaagatagtttgtactaccttttcttcatacttcattttgccaagctcgtctaacttttgtttaattaacgtctgaccaccaggtaaatatttcaaatcatgtctaaacgcaacatatcttaaatagagccaagtaatacctaacaaaacaatgaccgttggaatccctacaatcatccatttagcaaaactaatttcatgtccaaaatgttgcatgtattgtccttttaaaataattaatggcggggttccgattaatgtacccaagccaccaatcgtacctgcatagccaattgctaaaactagagatttttcaaacttttgaatacttgtttgattcgtattggcttcttgtaaatcatgtgcttccttaataattgctaaaccaatcggaatcataatcattacagctgcagtgttcgatacaaacatagataagaatcctgttgccaccatgaatccaagtaatatttttgaagtgcttgcaccaatcaaattaataattgtcaacgctactctcgtatgtaaattccatctttccattgcaattgccaaaataaatccacctaaaaacaaaaagataatatcattgccatattcggatgatacttgttctggtgtaagtatatgacctaatggtaataacacaattggtaataagctcgttgctgcaataggaattgcttcagtaatccaccaagtcgcaatccataaagtaatcgctaaaacatagacgcctttccaaggtaagtcttgtggatgaaagaataataatgttaataggaaaagtaatggacctaatattagtccaataagttgtcccgcactaaacggtttctttttctttgattttgaaaagaatgttaaataccttttcgatatcattgattgatgttgattgaaataagccataaatttccccctcatgatgattatgacaagctacttcaactcactatattagagtatagaaagttgtctatcttgtattatcattaccgtcaaaataccccttttatcagataattgggtttattatagcatatttataccgttttatgaatgcgctttcaaaaattatctactattcttaatcctaatgtcatgcgaaactttttacttttttatttcatctacattgattgtagtaacttgaatacccgcttcaacaggacttaaaaacactgtatcaatatcttctaaatgaattgattgagtcgaattattgaatgtattcccaacgattaatacatctttatgtttaacattattataattacgtacatgtatcgcatctttagacattgatcctttaaattcatttccaattatattcatatttatgcctgcttgggaacctaagtcttttcctgtcatcacatctgctgcatttttaccatctctaactcctaaatatctaatgccaccctcacagttaataaacttattattaataatgaaagcatctttatacttcaagggagttaatgcataaccttgtatatcttcaaatatattatttctaatatgaatattctcatagtatcgattatgtctacttgcatgtgagccaatagcacgattccaacttcccatttcgggcaattctgaaggtccaaaataacaatcttcgataatgacatttttcgttatcgtaccatctgtcgttccgaattttggaaaagcaccaggtacttgaatgtctaattgtattgcttcagaataaaagcgttcgccactatagtctatgaatccttcaaatgaacagcttttaatatagagtccgttaatcccacaagcatcaattgcatgaccactcactacattcttaatggtcacacctattaattgaatatcttcagcatgcccaatgcacatagctgtattgttataaggatacgatacaccattcatatcaaacttgccgcctttaatatgaatatgactgtgtccattataaccacgataaaaaccaaagcgacgaccattttttaataaaggaccagaatgacatcggcgtaaaatagtttcattatctaacaaaagtgttgtattgccatatatcgttaatggtttgcaaatatcatacgtccctttcggtatataaactgtcgttggtttacatcttccacgatttaacgcacgttgtattgctcgagtatctttagttttgtttatgcctgttaacccataatctttcatattgatatacataaatcgtcatcctttgtctattttctaattactcatatattaaccaattattcaaattataatcgtgttaggttgatttaacagatagtcataaatctcgtgatgccatctattagcatttttatattcaaaacatcaacacttgatattagttctaagtttgtcacatttagtattctattacagctattttaaaactatcgcaaaaacttcttatattatttgttgattgcgtgatttgctcttccaaaaaagttgattaatctatatacttaatctatatttatatattaaccattagggttaaaaattactctagcatttatgaatagatgggagtttattttattattatataggagagatgttgaatgacacatcgcgcactattagttgttgactattcatatgactttatcgcagacgacggcttactaacatgcggtaaacctggacaaaatattgaagattttattgtttctcgtatcaatgactttaattattatcaagaccatatattctttttaatggatttacattatttacatgacattcatcatcctgaaagtaaattattcccaccacacaatatcgtagatacaagtggtagagaattatacggtaaagtaggtaaattatacgaaacaattaaagcgcaacctaatgtacatttcattgataaaacgcgctatgattcgttctttggtaccccgcttgatagtttattgagagaaagaagtattaatcaagtcgaaatcgttggtgtatgtaccgatatttgcgtgttacatacagcaatttctgcatacaacttaggttataaaatttcagtacctgctgagggagtggcttcatttaatcaaaaagggcatgaatgggcacttgcacatttcaaaaactcattaggtgcagaggtagaacaacacgtttaaatcgtgctaaaataattataaagaatacaatttacaagggagatatttgacaatggctaaaacatatattttcggacataagaatccagacactgatgcaatttcatctgcgattattatggcagaatttgaacaacttcgaggtaattcaggagccaaagcataccgtttaggtgatgtgagtgcagaaactcaattcgcgttagatacatttaatgtacctgctccggaattattaacagatgatttagatggtcaagatgttatcttagttgatcataacgaattccaacaaagttctgatacgattgcctctgctacaattaagcatgtaattgatcatcacagaattgcaaatttcgaaactgctggtcctttatgttatcgtgctgaaccagttggttgtacagctacaattttatacaaaatgtttagagaacgtggctttgaaattaaacctgaaattgccggtttaatgttatcagcaattatctcagatagcttacttttcaaatcaccaacatgtacacaacaagatgttaaagcagctgaagaattaaaagatattgctaaagttgatattcaaaagtacggcttagatatgttaaaagcaggtgcttcaacaactgataaatcagttgaattcttattaaacatggatgctaaatcatttactatgggtgactatgtgactcgtattgcacaagttaatgctgttgaccttgacgaagtgttaaatcgtaaagaagatttagaaaaagaaatgttagctgtaagtgcacaagaaaaatatgacttatttgtacttgttgttactgacatcattaatagtgattctaaaattttagttgtaggtgctgaaaaagataaagttggcgaagcattcaatgttcaattagaagatgacatggccttcttatctggtgtcgtttctcgaaaaaaacaaatcgtacctcaaatcactgaagcattaacaaaataatactatattactgtctaattatagacatgttgtatttaactaacagttcattaaagtagaatttatttcactttcaatgaactgttttttatttacgtttgactaatttacaaccctttttcaatagtagtttttattcctttagctaccctaacccacagattagtgatttctatacaattccccttttgtctttacattttcttaaaatatttgcgatgttgagtataaatttttgttttcttcctacctttttcgttatgattaaagttataaatattattatgtacacgattcatcgctctattttcaactttcaacatatataattcgaaagaccatttaaaattaacggccacaacattcaaatcaattaatcgctttttccaaaataatcatataaggaggttcttttcattatgaatatcattgagcaaaaattttatgacagtaaagcttttttcaatacacaacaaactaaagatattagttttagaaaagagcaattaaagaagttaagcaaagctattaaatcatacgagagcgatattttagaagcactatatacagatttaggaaaaaataaagtcgaagcttatgctactgaaattggcataactttgaaaagtatcaaaattgcccgtaaggaacttaaaaactggactaaaacaaaaaatgtagacacacctttatatttatttccaacaaaaagctatatcaaaaaagaaccttatggaacagttttgatcattgcaccatttaactatccttttcaactagtgttcgaacctttaatcggtgctattgcagcaggtaatacggcaattattaaaccatctgagttgacgcctaatgttgcacgagtgattaaacggttaatcaatgaaacatttgatgcaaattacattgaagttattgagggaggaattgaagaaacgcaaacgttaattcacttaccttttgactatgtcttctttacaggaagtgaaaatgtaggcaaaatcgtttatcaagctgccagcgaaaatttagttcctgtgacattagaaatgggcggtaaatctccagtcatcgttgatgaaacagcgaatattaaagttgctagtgagcgcatttgttttgggaaattcactaatgccggccaaacatgtgttgcaccagattacattttagtacacgaatctgtaaaagatgatttaatcacagccctatcaaaaacgttgcgtgaattttatggtcaaaatatacaacaaagtccagattatggccgcattgtaaaccttaaacattatcatcgtctgacttcattacttaacagtgcacaaatgaatattgtatttggtggtcatagtgatgaggatgaacgttatatagaaccaacattgttagatcacgttacaagtgattcagcaattatgcaagaagaaatttttggtcctatcttaccgattttaacgtatcagtcattggatgaagcaatagcctttattcaccaaagaccaaaacctttgagtttatatttatttagcgaagatgaaaatgctacacaacgtgtaataaacgagctatcatttggcggcggcgctattaatgatacattgatgcacctagcgaatcctaaattaccatttggtggtgttggcgcctcaggtatgggacgctatcatggtaaatattcattcgacacttttacacatgaaaaaagctacattttcaaatctacacgattagaatcaggtgtccatttaccaccatataaaggtaaatttaaatacatcaaagctttctttaaaaattaatttttgagacaaaaataaaccatgcttccataatttgatgttcttgaaaacaataaatttcaaggtatacacaaattttttggaaacatggttttctttttatcatgattaattaaagattaaaatatgacacatacaccttcagatgctacacgagtgttatcacatagcgtaattttacctgtttctttatttctttcgaaaacagttacaactgaatctccttgctcatgagcacaaactaaaaggtcatctgatgaggcaatattaaaatctcttgggaattgaccaccactttcagtaattgttactagttctaagtgttgaccattatcaagaactttaaaaattgcaatgctatcatgccctctattagatacatataagaattgttgatcatgagataaacgcactgctgcaagtttagtatctccatcaaagttttcaggaattgttaaatgacgctcgagctcttcaaatttaccgtcattatattctgcaacactcacagtatttgataattcgtgtacgacataagcaaattttccattatcatgaaattcaatatgtcttgtcccatcactatctttaaataaagattctttataaaattcaaacccgttgtcatcaaatttataagtaacgatacgatcagcacctaaatctgttactgcaacgtacttaccatctggagtttgattaatataatgtgcgtgtggatgatcttgtctttcatgtgtacctgttggaaaatcatgtgcaagttcttgaattagacgtataatttcacctgtgtgcgtatttaattcatacatacgtatgatgccagcaccatataccgcttcaaataaatatcgtttatcttctgaaatcgatacataacaacctgtaccagcttttgaagacaaacatttatttaataaatgcaattcaccattgtcatcaattttcaaacttgcaacaccgcattgttctccttctttgttgattccatataaaacttcattattacgcaccaaatatgtagacgcttctaattcaaatcctgtttctaataaatcaatacgtgactgattttcgtttaattcaaaacgataaatccctttaccattctttttagtgtaagaaccaatatatccatttgtcattacttttacccctccatgttagtcttattttcattttattaaattttagctagaattaacaatcatttatcatttccttaaagctaaaactatttaactactttaaaagaactatttgctgtgatatgtcattattcgattttaattaatccctcttttttacttacacgagcattaattattaacgcgtttatgcttccacaaaatttttgttgcaaaatagaacacatgttcgtataatgtaattatcagattggggtgaattaaggatgacaagttatgaagaagaaactgattatcgtaacgttccaagagaattactagataacaatatacctatgggaagaggcatgattaaatgggctccttttgcaacattacccgaacaattcgaaacgattcaacaatacattatcgaccaaaacaaaattacacgtcctgtattatcagatgatcaattggctgagctaaacattcggctacacgaggcgctacaatatgcccaacctgtagaagttaaattttataataatggctttgtagattcagtacgcttaaccatttatcgtattgatgctattaattatgaaattgatggttatgtttacaatcagcaacaacgtcaaaaaatttctatctttgatatcttagatattgtcttgttaccttaatgctttgaacataattaaacagattgagtatatgcatataagatgatttttaacatcatttttggatgataggatgttgcgccacgatgatgtctgaattcatcgaattcgctatcaggtattgtttcaacaatttcattaacatatcgtgaaatatcattttgagggattctaacagaagtttctattggtagtgtagttggggcatgttataatttttatacataaggcacctcgttaatttagtttagtggtatttattaaattataagaagggacccaacacagaaaattcattttattgaattttacatttatgtgcaagttgggcaaagtgtcttattttttaaaagtatttcaaagtaaaattacatgttaatacgtagtattaatggcgagactcctgagggagcagtgccagtcgaagaccaaggctgagacggcaccctaggaaagcgaagccattcaatacgaagtattgtataaatagagaacagcagtaagatattttctaattgaaaattatcttactgctgttttttagggatttatgtcccagcctctaaatgttattagttatttttactttcaatatcagaaataatttctttagtttttctttcaatatcttcaaaatcttttttaaagatataagcaaatgctactacaccaacaccagcaactaatgttgtaatagcaactaagctaaatacgaatttaaacacacatttaataaaattccacatctcaatttcacctctgttaaattaaatacctatctacatttcattatactatcatatatagaataatcattaaataaatacccactttcacgaaatatattcatcaaattatatagtgagcaagctaatgattattttcaaaaatgccgaggaacctctgtttcaacgtgacatgaccttatatgctaatgttaacaatgactattatcgtgaatgctaacttaagattgatatttatgataagatgattttaagtttttaactcaatatccccaccatctataaaaatatgttttaactgattgataagtcttatacaccgagaaatcacctcaaacaattttatatttcatttagtaaaatataactttatttaacatgacattcaatatacatacgattactatttatttacaatatattacaactaaaaagaaaggggccgatgatatgcaacaagtgacatcagatatcatgacttttagaggttcacatttcgagttaggtgttaaaactggtaaatggcttcaacaaacacctcttctaaaaaatcgagaaaaagaatggaaaaaacgtgtcccacgtttcgatatagatgtaaatgaaacttatcaaatattccaaacatacgcacctcaaatatgggaagaattaatgggactacaaagtatactcaaaatgccaacacgccaaattattttaaactttggacattatcgttttaccgatttaaaagaaagtggttgcacggtctttcaaggcaaagacttcatggttagaaattatgattaccaccctgcaacttatgatggtcgctacttactttatcaacctacagatagcggtttagctcaaattggtcctgtatcaagggtaactggaagaatggatggtatgaatgagtcaggattaactatgggctataactttatgcaccggaagaaaccagcaaatggttttgtatgttatatgattggtcgtctaattcttgaaaattgccgaaatgtaacagaagcaatccaattattgaaagaaataccacacagaagctcatttagctacatactgatggacaaatcattgaaccatgcaattgttgaagtgacaccgagatcaatagatgttcgttatgataatatatgtacaaatcattttgaaatattaacacatgaaaatcgtaattatacaaaagaatctaaagaaagactggcgcgtaccatttcacaaactaatgataatttagatatgactacagcatttaagttattcaataatcctcagtatgaaatttacagtaaactattcaaaagctggtctggcaccatccatacatcaatgtatcaacctgaaacattaactgcatattttacattgggagaaaatgcgccaccagaaataatagatttcaaatcatggttagatggtcaagaccttaatatcactcactttactggcaatatagataccgacttaacttttgccaacaaataaataacaccgatattagagaaattatgcttcctaatatcggtgcttacatcctttatttattcaactttgatattaccatcaatcgtataaaattctaaaacattgtcgcttttcccaactttaccattagtaaatgttttatttttaactacgctatcacccgttcccggatttagctttagtatagtgtcttcaggtttactatcatacttaaaacgaatatctccttgtttagtagaagcttttgcatctacttttgatggcatgtttttaaattcaatgtcaccatgatcgtttaaaaatatggattgtttaatttgactcttgtcgatttgtagcgtaccaataacaactttaatattgctatttttaatgttacttttactaatataagtagaactattatttgtctttgaatctagtgcgtcaagatttgagtttttaataactacttcaccgttaatgctttgaatacttgtgttctctaaatcaacatcactgattctaacacttcctgctccagatgatagatttaaacgtttaatcattttatcaggcatttcaatcgttaacgttttcttattctcatgaaaaggattcatatcaattgcatatcctcttgtcttagaccttttatcactaatcttcaacgtcttatctactatattaattaatatatcattgtcaccatcatatttaactctaaattgattcccccgttttatacgaagttctgtactatccaaatttatagatacattgtcaaaagcatcgtctttgaatgttttatcatattgtttagtaccatatttgtttttatcatagctgaaccaaataatggttgctgctgtaaaaaagacaacaaacactaaaagcccaataaaaaagaatttcttcattttctaacgcttcctttgacagttttaatataccaaagtaaatattttaagattaaacgataaatgtattctaaaatcttaaatatgacaatgataaatactaatcctaatcctgaatatgatatggcaaaaaatacattactaattgagtccacaattcctctggatattgctgatgctaataaaataattggacaaaacagcagcaaaagtgatattaaaaataatgctaatacaaataatccaactatagatactggtataaggatgacaaaaatagatagaatgcctaaacttaatgaagcagcaacagctcttgaaatattttcaaatgttggtttagattcagcataatcaatgacacttctagcttttgtttcagctgcaacatcttgtgggtcttttaacttctttaaaatttccccttcatcaacgccattaagttcttgctcataaaaataacgttcatattcatacattttttgatctcttaaatgcctaggtagcgcatcaagtgctgtttctaattcatttaaataagtaatcttgttcatataggtcactcatcccaataaaattattcattcgttttttataactttaagacctaaagctatttactaaaaaattcaatacgtttaatttctaaatcttgataaagtaagtttaattttaaatggttatctctatcaatatactttaccgatgagaaatcattgccaacttttgttcttttatatccgaatccaagattttcaatcgcgttatttatcggcgaaccaattcccccatcaaaattagtatgtatcttttcatctcttactaatattatccccttaacgatgttatccttttctctcactttaacggtaagatcagggtgagctttactgttataaaatttaaaacgatcaaacttaatttttttatttacttcatagccttttttatcaaacttctcatttaatttaatatcgtttatttcaagattagacaaatccacagttttcgtatgacgatattgatataaaccaattaatacaccaaaagaacagattaaaaataatataaacacaacccagcgattttgaatacgcactgatgtcaccctttctttgtacttatttaaatatagcataaggtgcttcccgtttcatccttaacaaaaattaacaaagaatttgcaattaatttatttcattaccttttattactataaattggtataatgttgtaaatgctaaaggaggtttttacaatgacaaatttagaaacttatttcaaaaatagccaacccttaaatgaatacattgatggaatgaagacaaatcaagataccgttctcagtatctatcaatcatttgagttaccagaagatgattcacgcatcaaaaaaataaaagagatgaattattctaaagtattagtaattactgaagactggtgtggagatgcaatgatgaatctcccaattctaaaacacatcagtgaagcattaaatttagaagtacgcgtgttccatagagatgatgatacaaaactgatcgatcaatatttaacaaatggtaaatcacgtgcaattcctatcttcgtattcttgaatgatcaattcgaacaagaaacagtttggggaccaagagcaaatgaagtccaaaaatttgtaactgatgttcgtgctgataaattaccgagcaaagatcatccagactatgcagatttagaaaaagaaacacacttagttatatcaaaccgctataaaactgacgcttcattttggaaagcagtttataattccatcctaaataaattagaaaataaataaatttacaataagacaaactttgaggttgggaaaatttaaaattcccaacctcaaaattatttttattaaatgtcttttttagcgacatataagatattcaaaatgaagaatatcactatagaacctaatgaaattacccattgccaattgctaaaatcaaagttagagctaatcattttatcagttaagtaagcaaaagggatataatcaaaagcatctaaaactttttcaccgtatcttgggataaatgtaataaaaggtttaataaacggtacaatgagtactaaaaatacacctaatgaaaatatcattgctgttttttgtgatgcaagtgtgattaagaataaaaacaagccaaagaatagtaaaaagattaggaagaaccataaattatctacatatttagaaaacgccaaattttttccattactagatgcctgcacaacaatcaaaatcacataatgaattaatgcaaataatattgaaattaaaataattgaaattgttttcgaaataatgtatccaacgcgtgttttaactttactcatatatagttgaattgtaccttgtgaaaaatcacgcgtaattgtcttaacaacaaacattaatccaattattaacaataaccattttgctgcagcaaatacagatccatagacaataatatgtttcgggttatccatcgaatttgccataagtatactttgagttgcaatcaaactagatacgactagtatcgctaaatatgttaaaggacttttaaatatactataaaaatcatacttaactaaatttaaaattctcattatttatcacctctttgatttatattgaagtacgtatcacgcaatgaacttttacgtgtttcaatatatttcggataaatatctaattcagataatgcttttagtataacttgataatttttttgtgcattgatcattaaatgtccgtctgctttgtcgacattttgtaattggaaatgctctgcaagatatttttcagttctatcaaagtctttatgatcaacagtaactatcgttgtgtcagatgcaacaccttcctccatgtttacatcttgaacaaaatgtccgtctcttaaaaatacagctctatcacaaattaattcaatatcttctaacttatgacttgatattagaattctcatatcaagttcatttactaaagacttaattgtagtcagcacatcaattgagccatctggatccataccatttgtaggctcatccaagattaaaaatttaggtttattcattaaagatactgcaattgctaacttttgcttcatccccattgaatatttcttaactttctttttaatataaggtctcataccaaatgcatctataattttgtctgtgtatgctttatcaaaacccttacctaatacttgtgcaaataatttcaagttatacaatcctgatttattatcatataatttaggatgctcaattaaaaaaccgatattatctgcattatcaatatctacttttccatcaaatttaataatattaccattcattactttcataacggttgttttaccaacaccgttttttcctattaatccgacaattctactatcgccaaagtcaaaatcaatatcatttaaaacgacatttgagccgtatttttttgtaatatgttctaatttcatcgactgcctcctttaaattttctagtatttattttattgagctgtttaaaataattaacaataagtataacaatgcttataattagaaaaccaatatttaaaatatatgaatataaatctgggaatgatgattgacttagaacaaaataattcaccaatactattgcaattgaaaataaaaatggaactaaaatgataatagtaaacacgtatataccatatggcactttgactctacgcaattctgtaaattgactaaatgcaattggtatagacaagaagttagatatgacaaatgcatatgcagttgaaaaatagattgaatttggttcaatcacatctgcttcataagcatataaactaataacaagcgttccaattaatgttaaaacaatgcatgtaatatagttggcattaagcaattgtttttttgacactggtaaactcatataaaaataatatgaatcattaccacctaatctacgattgagtctaaataagtgaccagcatctaaaatccaaataatcaatattgttggacttataaaagattgcaataagtaaaagaactttgttgagtcaagcattatataaaaaggatataaggttaataatagaacatagatgataagtgtatatcgtcgtaatttaaaattcctaattaacaatgccttcatttaaaaaccttcttccatcaatttgatgttttcatgatatttaggttttctcttttcaagataaaccattaagttctcaatagaaggtgtagtgatattcactttatgacctaaaatttctttaaatacttgcgcatgttctgttaatcctataaatcccgtacgcttatgttcttcataaataagtagagatgctaattcatcatcaaggtcctcaatagcaccactcacaacttgatatctttgtaacagttgttcttttgaaccatttaagataacttcaccgtcacttaagtgaatgatataatcagctattttttctaaatctgagataatgtgtgtcgacatgaatattgttttattttcatcaattaattcttgctgaattatctccaatagctcatttctagctaagggatcaagacctgaagtaggctcatcaaaaatatacaattcagcatgatgtgaaaatgcaactgctagtgataatttcattttcatcccagtcgaaaatgtttttattgatttattgattggtaaatcgaacttttcaagataaaattcaaatacttgatggtcccatttacgataaaaaggggcaatcattttttcaagttgcttcgtagtccatctctcattaaaataattttcagagtaaacaaacccaattctattctttaactctatcggattgagagccatatcctcttctaatactctaataacaccagtttgtggttgatacaaatccataattaaccttattattgtggttttaccagcgccatttctaccaataaaaccagtgacgaatccttgaggaactttgaaagagatattctttaaattaaactgatcacttgaataattaacattacttaattctatggcattcatgatgattcctcctcataaatgaacgttaaaatatcctgcagttcctcaagtgacatttcgatggcttgcgcttcattaaccaattctttaaccaaattttcaatggtaaaaaattgtttctcttttaaaatagaactatcttgctccttaacaaaggtcccttttcctctaattgttgtaacaaaaccgtctttctctaaatcttcataagcacgtttggtagtaatcaaacttacttgaagatctttggcaagttctctcattgacggcaaatgctctccaggagcaacatgtccctttaaaatattttgttttacttgttgcttaatctgttcataaatcggaaaatcactattgttttttaaaattattttcatcaacgtccccctatcaacttctgtatatatacaatatacacaatatacacagttttgtaaatatgcatgtctcattatcaaccagtcttcagaaataacactgagtattgtattactagcagttgaataaaataaaatgaaatgacactaccatttaatcttgcattgtctacttcaataaaaaagactgctaaaacgaatgtctttaatctctacgtgacaaccgtagcgtcaacataaacaatcgttttaaacagtcaattctatttactatttttacgtcgatcattacttctacttataaaagcacaaatcataaacataatcgctgctaataataattttataccttggctttcatgattagttgcttgtaaataataaccaataataaataaaataattgcaagtactacaaatatttttgttagatgtttcaatttatttcacctcaacatcgacattataacaaatataaatttttttaataagttattgaatttcaaaagttcaaggtactaatcactttcaactaaaatagcgcaacaaaaccattcaatcaaaatgattattgattgcgatatattgtgttcaatgatattatttaagtgtatccacagaattatactacacaaccccaagtctggtaccagcagacttggggttatttatgtgtgtaggatcattttttatttttccatttcagttctaaccaaagtcgaaaaataattagtaagccacctgtaataagtgtcatcatcccttcttgccaccacatcattacactacacctccgttcgactaaagtatcatactgaaggatgacctacacctattctaacataaaaacagaacatatgttcgtattttggcagcagattttacatattattcgttaattcaccaacaacactttatctttggtataattgaagataatatataggcatacaatttttttaaagagaggttaagcaataatgaatcctttagcccaaagcttaaatgaacaacttcaacagtcaaatgcaactgcctttacaatgttatctgacttaggtcaaaatatgttttatccaaaaggcattttatctcaatctgctgaagcaaagagtacaacatataatgcaactataggtatggcgacaaacaaagacggaaaaatgtttgcatcatctttagatgcaatgtttaatgatttaactccagatgaaatattcccttatgcgccaccacaaggcatcgaagaattacgtgatttatggcaacaaaaaatgttgcgtgacaatccagagctatcaatcgacaacatgtcactaccaattgttacgaatgcattaacacatggtttatctttagttggcgatttatttgtaaatcaaggtgacactatcttgttaccagagcataattggggtaattacaaacttgttttcaatacgagaaatggtgcaaaccttcaaacatatcctatctttgataaagacgggcattatactactgattcacttgtagaagctttacaatcatacaataaagataaagtcattatgattttaaattatcctaataatccgacaggttacacacctacgcataaagaagtgactaccatcgtcgatgcaattaaagcattagctgataaaggtacaaaagttatagctgttgtggatgacgcatactatggtttattctatgaagatgtgtatactcaatcattatttactgcattatctaatttaaattcaaatgcaatattacctgttcgtttagatggtgcaacaaaagaatttttcgcatggggattccgtgttgggtttatgacatttggaacgtctgatcaaacaactaaagaagtattagaagccaaagtaaaaggtcttatacgaagtaacatttctagtggacctcttccaacacaaagcgctgttaagcatgtattaaaaaataataaacaattcgataaagaaatcgaacaaaatattcaaacattaaaagaacgctatgaagtcactaaggaagttgtctatgctgatcaatatcattcacattggcaagcctatgactttaactctggatactttatggcaataaaagttcatgatgttgaccctgaagaacttcgtaaacatttaattgaaaaatattcaattggtgttattgcacttaatgcaacagatattcgtattgcgtttagctgtgtagaaaaagaagatatcccacatgtatttgattcaattgctaaagcgattgatgacttaagataattaatttcaaccaataatctgatgagtatgactcggattattggttttttatttttaaaattattccttctttcaaagtatcataagatatattttattcagcaacttgtcaaacactatacctaattagttttatacatctctcctaacaaaatcaaaaaatcggacagatgaaaagtaaaaaactttttctatcagtccgatttattatagaaccaatttatataacttttggcaaatcacttcaaacattcaagcatcacatctctacaaatgtaaaaggcaccccacgattgtgagatgccttattataaaattaaagattagaatttaagttcaatatctacctttttaatgtcagttgctttaaatactctttcatctttatactcagtttttaagtctacatattttgacgaaccatttttaaaatacactttatacactgcgcgttcagcaagtcctatgtcatgtttagttatcccttgatcatttgccattgctgatttaagttttatacttaaatcattaattgtaattttgcttgcattatagaacacaaattcatttgaaactatgttttcaaatttatttattgttactgggaatttcacattattagatttatttatttttttttgatttagtgtattgttttacatcaatatcaatctttttaatatctttggcactaaataaattaggtgtaaagatgtctgattttaaattcactacttgtttctttccatttttgaaatatactgtatattttgcttgtttcgcaaattttaagtcaagatcactgatgcctctttcactttttaatacagatttcactttgtcatttaaatatttgtaactaattaattgtttattcgaaattttaagttttgataaaattggtgttgatgtgccatttactgcaattgtatatggtacatagctatccgctttcgctttagttcctgttttaacatcaatatctatctttttaatatcttgaacataaagcagattcagttggctaatatttgaatttatgttaatcacttttttcgttccatttttaaaatgtactgtgtaagttgctttttttgcatattttaattcacgttccccgatacctctatcatgcttcaatactgatttaacttttttagagatatctttgtagcctacacgtgggtcacctgtaaattttaaatctgataaaattggtgttgatgtgccatttactgcaattgtgtatggtacatatctgtctgctttcgctttagttcctgttttaacagtaatttcaattctcttaacatctttcgcatgaactaagtttgctgtgtaattttttgaattcaactgtaagattcttttaccaccatttttaaaataaacagtataataagctttcttagcatattttaaatcttgttcactaatacctctatcatgcttcagtactgattttatttgactagttaaatttttgtaatttgtccaaggtttatttgaaaatgaaagattcgataaaatgtttgtagatgtaccatttaaattaattgaatatggaacttgatagtttcttttagctttattttcgatatgtttttttgtatctacgttaatattgatacttttaatatcacttgaatttattaaattcgctgtgtaaatacctgatttcaaatcgataactttcttcgttccatttttaaaattaactgtatatttcgcttgcttcgataatcttaaatcaacatcggtaatacctctatttgattctaaaactgatttaactttatcctctaaatctttgtaactaatattttgattcttattaaatgttaagtttgataaaatattttggcttgtaccgttcacagtgattgtgtatggaacttggtaatttgctttatctttctttttatcttcaacttgctttttagtatctacgttaatattaatagctttaatttcacttgtattaattaaatcagctgtgtaaatacctgctttcaaatcgataactttctttgttccatttttaaagtaaacagtatatttcgcttgcttcgatagtcttaaatctatatcactaatacctctgtctgattttaaaactgatttaactctatcctctaaatctttataactaatattttgattcttattaaatgttaagcttgataaaatattttggcttgtaccgttcacagtgattgcatatggaacatggactttagaatatccatggtgtaacgaacttgatgatttatctaatggcttagctgcggcagacgcttcattattattaaagtttgcacctgttgatgctaaaacacctaatgctaaagttgttgtaatcaatgacttaaatttcataaattatctctccttttttgtgtaattcgtatttgcaacttaattatagccagactttctctattttttgaattaactgaatattaataataaattatctttaacaataattttttaacactgttaaaagttcttttaattttgattaactaattaatttacaatacctaaaatgttgtttggttttgtttataccaagcttcaaacttaaatgtcataacaacattcatttcttaattccgattagatttgtcgattatatttacagcatctttatactcaaaaaacatttacttaaaaatataaattcgatttaataattaatttaaatttagttaatcaattttgcatctattttgttgtaagctatataaaaggagtgataatgatggtgaaaaaaacaaaatccaattcactaaaaaaagttgcaacacttgcattagcaaatttattattagttggtgcacttactgacaatagtgccaaagccgaatctaagaaagatgatactgatttgaagttagttagtcataacgtttatatgttatcgaccgttttgtatccaaactggagacttttaacataaaattacttatcattcaaaaagtaaaacagcataatatcaaggtttataactttatcattatcaataatacctcatataaaataaaattttagggactttttagggactttaaatttaaaattacaagtttaatagaaacatcaaaataatcacatgtttgtgtggaatgtacaccccaaaagctagactgaaaaatctattttttgaggtgtatttttataggtaaatataataaattagagtagacaactcagaattccaattttataataatattgcttgacatatcaaactagatagtactattttgaatatattattataatcaaaaattcattgtaaacttttaaacaaaaggaagtaataaaaacgtgaaatttaaaacaactaaagaatgtaaaagtaataatatctttaaaagaagtcaagaaattaataatagtgaaagtgaaaagggttgtttatggggcattagcatgttgattctacttttcttattgattctgtttggaataactgcttgttcatcaagcattcactttattaattagatttttttacttggaggtatcatgtgaagaaccatacaaatataattaatatcttattagttatagtcaactcattaactcattttctaactctaaacacctcattttttaataattcagcatcggatttctgttttatcataggggctatatttttcttgatcggaatttttgttgcaatatacggtatgaagcgagcaacatattggttaaacttattgattttatttaccaatattttttattttctacacttctgtgttttacttttgttaaaatatataggatttaaattatttatttatgaagggtgtgtattgttatttacctaatttatagtctaattgtctatttcatctgcattataaattttttcataatggccgcaccattcttaatgactaatgctgattatgtatggacgcctatgactacagttacgttatttattttgagtttgattattttcttgatatttataaaaacaaaagatgtcgttcatttaacaattttcatattaaacttacttttttcaatactttattgtttacctatactgttttatttatgaacacttttatattatctagaaaattaaaaccacccttttacgggtggtttttttaatatttactttttagtgcttcgtcaatttcattataaatcttttgaagttgatattttgcttctgacattttcttaaagtcttttgacttaagagcatacattgctttttgacctgaaatttttatagttcgcttataataagtgtttaaacttccagtagctaattcattaacatttagttcatctaataacgattttaattcattagctaacttttcgttttgatattcattcgatgttggcaagcttgtgctagcttgtgcctcatttttatctagattagttactagtggtgatgctaaaacgattgctaaagttcccgcaagtatagattttctaattttcattttttattctccttagtaattagtactaatttattttaatgactaactaaaaaaaagtacattaattattcattaactatatagatcttcttattaaatgaaaattaataaattatcaaattgacataccttattgtatttatagaaaaacaaaaaaaggtaagcaccgaaatgcttacctacttcccataaacaatataacacatatacattgatttggaaagcgcaaaaataaatttaatatactagcccgaaggggagcaatacataaaaaatgaaaggcgctccttgaaaacgcccaaggtaatattaacataaaatggctactattgcattatctaattttatttaattaaaacaaatatatagcacaaaaaaactagcccgaaggctagcttatgaatagatgaaaatttgaacacattgctgtgtctaaaatgattatagcataatttcaaactattctataataaattaattaacttcatatgaaactttacacactttttttcaaagtgcgctaaaattaccaaaactacttattctattacctgccttgtctacctctcctgtcgctatataacaacgttgtccattattagcaatataagtaatccatctatagccattaatgcaatatgcgccgtcatatttgatcgttgcgttattgggtaatacacctgtaattcttgaattagttgaatagccatccctcacgttattacctttaacattggcaactgtgtaataaccagtctcttttttatacggtacattgtttttatcgagtgtataacctgctggcactggtgaattcttttcatttttagctggtgttttaacattactgatacctgatacacacttccaataaaaataaccacaccatttaagatgcggtgtagcgactgtaatatttctatgttgttgagatatatgtatcgagtgaagggcaaaaaggatatcaattgcaggataagtgttaggttactaggccacttaacaggctatatagttcactcctactatatacacttaattataacataaaaagcaccccgtaaactattatacgggaatgctaaagtcatatatactacgggggagtagtatgaaaactatgctctctatcataagaaaaaaacacccagtgacatgcttgggtgaacaaggatagatgtaaatagttgatgcatgtgtaacacatcatagcaaaaaactagcccgaaagctagctataacatacaatctaaaaagacgtcctttgaatacgtctagaaagattataacataaaaaaataggcaagtaccgaagtacctgcctaaaaaaggattatccactttttcatcctaactgatttctccccataagtcacctaatatctgattaggtggggaagaaccattcgtgcatgaatgagaatttgatgaaagataattttcactacacatattcaatcaagacattgctttctataataaacaactattttgttttatttcttttctataacaacctttgtaattaagttgaatccagggtttttaatatgctctgataaatctgggacaacaaaacctttttctgttatagggaaagacttcgtttcttcttttttcttattcttatcataataagtgacttcgatctttgcgcttggatctaattcaactactctaaactctttatatgctgtcgcatctaatgcccattcgacatagtattcaattttttcttttgtaagtgtagtcccaggtttaataggaaactcgacataatgaggggatagcaattcatttcctttaccatcaactccagtcacatttaccatcaaatacgggcctgttggttcaaaataactcgcgtcatcgccttttttatattttcctttgtcgaatgaacttgatgcacttacctcattagtaattgaagaaaatgagaataataacaataaaacagttaaaaataataaacttcttttgagcatggcgcttcctccaaatataatatatttgtttttatttatctctttttatagctaacacccttatttaagatgataaatatcaacaacttcattttatattgagaaaatattaaaaatcaataaaatattaaaagaaactaaacttacattaaaaaataattaacaaatatttaacattttaacctaagaattaaaacacttctttcacaatcaatctctcatgccatatccactcattatgattgttccaataaatgcgacaccaaccatctataatttcaaacacatatattaatgttccaggcgcgtatacagcctgtccaacatcgaatctatagttagtacgattatcaccgtatctagtggctgaagtagcacctaagccgtcgattttcgcattaaaataagcaccttttgaccatttaaggttataaggcgctttacttccaactgttattttacttgcagatttaccgactgctttttgagcaggtggtttaactttatttgtgatcttattcattaagccctcacttttatacttaggtctaataaagtgagtacagccgtaataattatcccaacgtaactttgcaggcgtatttgcgttaccgtcatagttctgttccaaaattaaaaattgatttgtattaccaccattaaacactaaaccaatatgaccgtattgtttatatattcctttggtaaatacagccacatcacctatttgtggaacaaacgatggtgtgttttcatatactgttgccatgtttttaaaatcgttattgattgcatcttttgcatttccccacattctaatttctaacaaccaataaatgtaatcaactgctaaatctgcacattggtaaccataccaaccgtcaaaatcaatatatctaccttgataccaacgtaaccttgctcttgcttcactgtatgttttcattattttacctcctagtattttcttcttggttcttcatattctaaagcttggtggctatcacctatacctttagtagtcgggtcttgaatcacaccagttaatactaaaaatcctaatatagcgtttaaaccgtctgttaattgctctgtataaacttgaatatcatacccaatagcttcggcgatgttttgagcaaataaaaagatagctgacaatatcgctacccaaaatgatttttgtttcattctaattttccaattaatcatattcttatctccttttatccaaaataaaaagacgaccaataagccgtctatttgatatttatattatggtgtgttaatttatatatagaaaaagggcaacatgcgcaaacatgttaccctagtgagcccgttaaaaagacggtggctattttagattaaagattaaattaataaccatttaaccatcgaaaccagccaaagttagcgatggttattttttattgcttaattcaataagcttgattactagacctatcaatgcaataaggaataaaccaaactgcaacatggtactaattgtaatcattaggcgtctcctttctaaagatttcagtaatgccaccataggcaccacctccttatactcagatagccaccatctatccaacttgctcaaagcatattatagcacatatactttttttactgcttgtaaacttttagattattctcggttcataataatctgaacattacgtggtcaaaactaccatgtttaacttgtatataaatatatatcaatatgcatgttttcagagttaatcgttttattatctctatatattcttaatagtgtatttgaatactgtccttgagcaccaaataaatcgtaattaaccgaaggttctgtagaagtatgaaacacgattaatcccctctgaaccttcccatcaaaaacatcagagttatataaattatatttttcctgtaaataacgtcttgcttgaagatccaactcctgaacagttacatttttcttattcgttttaaccgtttccaaaggtactgtattttgtttaccgtctagccataaattgatcggcacttttttctcttcggtcaatcgattattatcatgtaacgttacaccaccatacatacaagctgttttgtttggtgtaccacccgcacattgataaccataataagcaccatacaagtctacttttttccctttatatttatcaacaatatcctttgaatcaaaatctactaataaatcgttataccacgaatgatctgtaaaaaagcctttaaacaatatagtatgctgtaaaaattgatcgtgactctctttattttcagttttagctttttcattgtaataatagatttgtttaagattgcctaaagctgttccctgcaattcagacttttttcgcaaatctttttcatttatttcttcgcttttctcgctaccatttacaagtggacttgttgtcaacgttagggcaatgaataaaagtaatgtaaatgctgtttttttcattttgctcacctctaaagcataattatttttgttaagtagttatttagttatatacaataattatgaaatgattatcatttaattatacatacatatattactatacactttttatatttgtctataataaaaagatttcatttttactctattatacatttcagatatcttacttacttggtattaacaacacttcccaacttcacttgcagtatgcttcctgtcttttgagctgtgtaataccatgtacgtacctcttttcaatcaaaataaaaagccagtgccgatgcactgaccaaaaacattatttacatttacgaccatacaaataacatgataaccatcttgcccaactcattatgtccacctcccttaaggtaataacgcagtaattgatgcagtaatgactgcaatcataacaattgttacaagcgcccatatggcacctacgagccatttattttgggcgagtgtcttttcttcatttttttgcgcaacatctacttgcgtttgatatctttcttcaattctgtttaatatctttgtttgctctaaattctcatctacaactttatcttgcttatctttaagttctttatgagattctcttagttcattatgatgttgcttatgttcctctctaagttcaagcacatgatcagctgtttcgtttgctagtatttcaacatcatcaacacgttcaactaattcagaaagctctttttttattttctgaatatcatccaaaactacacctactttctaagaaagctatgagcgtaatgctcataacttagtatagttacattgtttcgctatcaactgatttatcagatgacaagtcagttctatccacaacttctttcacaactttcacaccgttttgattgcctgttaattgatataaaagatttaaagtttcagcaatctttttagcgttttcctcagatttaaaatcttgtgcataacttgctgaatcggacgttgtaaaactgcctacaaaatcttgatacaaaacgcgctctgttccctctttgtcaatttgtactaaaataaatctctctgtttttttgataatttcatttgccatattaaatgacctccttaaatttttgtataaaaatagtgccaaggattactcttcctcagcacttttgcttttttcattttgttcttgtatatatgcttttaacattgcattttcttgtgttagtcttgtgatttcttgcgataaatagtgaattgtatattgtggattggcttgtaaaccttgattgctatcattcatttattaattcctccagtttttcgatttttgattgctggtttttaataataggtattaaatgaacccaaagtctatcgtatgcgataccttcgatttctccgttgtcatcataaataacaaattcattaaatcctaattcttcaacctcttccgctattaagccagtatgtcgactaagtttaaaagtatcatcagataactttttaccactttccaattctttagccattatttccgattcatatttgtcaaaccatgtacgaattggaagctttaaaatctcttttgaatgactgaactgatcgtcttcattgatgtattggttttcgattgaaattttatactttttggcagaagtagcacgcccaattgttccagcagaagtaatgtgtaagttagcaggtgctgaataagtacgcttataaatagaattagaagcgactctatcgccagcattatcagaacctaccgccaataaatcataactttgaatgctaacgtaactatttccatctcttcgtttaactaagttgaatttgcccatacctgattcaattgtagtgtctccgcctgtagcatagtcaccattaacgacttgaaccaatcctttattgctacgtttagaaaatcttaatccagcaccgtacttatagttttcatctgaaccaaacatgatataaccgtcagtttcgtatgcactatcagcgtttgataatgtgaatgcgaatcggtttaaaccaggtttatttttggtgttcggagataaatatatcggcgcttctctactttcaatattagctgaagcatatgaatcgataataattcgattgtagtcagatgttaaagcgactacaccgccataagaattgattgttatgccattcataccgctatcactgtaagttttatcccaccattgaatagtaccggatgaacctccgtcttcgccttctccatcaatatatgttgaaataccaaaatgtgacatataaagtgaaccgcctgcggtattatttctaaatcttaggtgaccgtctttcagtcgcgtaaaaatatcgtctgttgaacgtttccctctccaagtacgttgcacaataccacctagttcaatagaatcattctgtatttgaacatatctgttattgtcaccgcctttaattccaattctattaacattgatatcaagaccctctcttgataaattaaggctgttgacaatatcggttttatctactttatctcgcatattttggataagaaggtttatttctctattaccgttaatatcaattttatcagcatttaatctaataccacgtggccccacattcaaagcttgagccactccgttatcatcatatctgattgttgttccatctgtaacattttgaacaatctcgtttaatatatttgaaagtgtacgattggttgcattaaactcttctttagtagttcttaatttgatttccttaccattttgtataatttgagaaccatagcgagtcaatgttttcctctgtgcatctgtgctttctttgaccttgttgtctgtataagcattagctttcttttcagcgtttctagcctttagttctgcgttttgttttgcctcttcaagtttagcttgagcatcttgtatagcgcgttgctcttcttccgaaattttaccatcagcatacgcttgcgattccttctctttaagatcatcttgagcatcaatgtatgattttaaagcttcttgcgcttcttgatttgcttgttcaatacttgctttaatctcaggattattggacaaatcacttaactggtcatcagtatattgtttttgttcttccaatccgtttcgatattcgtttaacgtaactttatctttgatttcaccttttaaagtcgttctctcagcttcagcagtatctaaacgttcaacaataccgtctttgtctgttttatagtccgatgtttttacatagtcacgtaattgttcttttgtggattctctagctgcttcaatagctgatttaacaacattaggttctccgactaactgcaaatcttcattcaccgttaaaccaaattttgttgctattatttccaacgcttctttatatttttcatcagtgtattgtgactgtaataatttaaatctatctgaaatggcgattttgacatcttctacatctgtataaacatcttgtaatttctttctatactcaagaaataaagcttgtgtatctaccaaccgaccaatcgttgcagtttcgggtgtcatagattctaaattatttttaatttgattataaacatcaatcacagcgtctaaacttgcttgtaagtccgctttcaaatcattatctactaagtactcgctattcagtaattctgtagcttctgacaaaagactagcgtgttgtatagataaattaataaatatattgtttaattcactgaatagcgctttctctcttgttataccacctaatttttcaacatcatttggtgtttcttcaatccatcgaccattccaatatctacgcaagacagcaacatcagggttacttgtatcataccaaagcatatcattgactggattttctggcggtgtatcacttttgtgtattttgcgttcaaagtattctaattcactatctacaacatcttttactatagtgttgatattgctaatattatcgtttaacttttgatgtattatgttcaatcgcttgttaaactcttctcgtaattctgattctttgaactctttaggttgaccgaatgtatatatgctattttctgaaattatgttatattcttcggcaataacttctgcctctacatacaatggcgggttaaaatctctatgttttactctgactgtatcaccaattgatataatctcgtgcggatacgtaacttccaaatcagtagaagtaatctcatatgacataactgccgacttacgtttatttaactctgttttggctaaagaacgcaaccgtgtttcattcatattttgatcatctgattgaggttcgtatattccccaaatataacgggtaggtaagttgaattgactttgtgcttcgtcatctgtcacaactaactctaaacgctttcctttgtcgttttcgggtcccacagcaattaatgctgttttgatttctgacatatcaatcttcctagttaacccaaccaaatctttaccatactcaatttctttacctttgaataagctgtttttctttttgagtaccacatatctacctttgacggtattagaactaagctctatataaaaatccaataccattttataggttgtacataattgctttaaaacttcatatctagtttgataagaagtccatgacgtagtacgtaagccatcgtattcggtttgttcagaaacttcccaacctgtatcactcaacacatctttcaatgcttctgaagttatctttttctcaaatttgcctggtgcatacggtttagctgttgttatatcagcaagataagacgctatacattctatctctgtgtagccgtccatcgtatcttgaacccagttaataataaattcacgccattgtttgtttgaatcccttataataacacgatgtcgttcacggaacttttcagctctttctgatgatatgagcagttcaagcatttctgaattgtcattaacattacgtttatgaatcgctctaactaaggaagggtcatcagtagaaaggaaatctataatcttgtcgttaaaatctaaaacatgtatcacactctcatctcctttctataaatatctatcttgccatttaaccgtcgtatcaaagacgttttcaggttgtatgattaattcactgtacccagaatcaacattgaaataattacttccaaacgatttctcgctcaacattggttcctcattgatgacaacactttttgcttgcatatctattttcactaaatcacctttttgtataatgacatcccttgcgcctttcggtttcggtagaatctccgtattgaatgaacctaatccattcatctccatccacttataaccgttatacttcgcactatagatagctatgatagaagctggacgctgataaaacttaccgccatctatccactctttctcatccatatcaataggtttacgtctatctgggtctttaatgtgatcaaatttccaagttttaatagaaaatttattacctactcttctgagccgcatataaacaacgattctgtccaagttatacattatcggtttattctgatagtcgtatatctttttggggtctcctttttggttatacaacgtaacaacaatatgtcctatttttctatcatgatatttattttcataaccaatagaagcaagtaacttaccatcactatcataaatatgttgtgctgttcttccggcacctttacctttttgttcaacaatacatttataggtaatttgaaaatctgtcatcgctttagggagccctcgtttcgtgccagcaccaacccaaccttttgcatcaggaaaattagttgctttatatccttcgccaagattggatatcacaaagtcaccgccgaccttaccacctaaatcattacttggaatatcttcagtaatcatcttagtccaacctttgaaatcacgaaactcactatgataaacaggaggcatgtaatccttaacttctttggttacctcatcatcaccaaccataaaataatcttcatcatttttagtgatcataaagtaactagatggtttaattgctcgggcttcaacaattaaaggagtgtcagcagtcccactatttacaactgaaaattggtctgaaatcgcagtatttttatttcctgttactgaatatttgtaagggtctgttagtactactttgatagtgaacttcactgaacctcttgggtttttcggtaattttaatggtccatcaaagtatgcaaaccaataccagttttgagatttgaatttaagttttttcggctttaaattgtcaatatcaaaaaattcaactaactcttccaatatatcgtcatgcgttttttgtccacctggcgccaagacttcatttctaattattagaggtaattcaaattcgatatcatttagataacgagctttagcaatagaacctgttctacctttcacactttctttttcagtaacaaaattaaaagagggtatctcaaaccctctttgtacaactaaccattcaatggttttattgtctatttgaattgtatcttgcattagattatcgtgcctcctcttctaaatctaactcttgtagattcgtgacgctctcgtttatcgatagaattatttacctcatcttcaaacacatacttattaataactggttcgtaatccttatctgcaataacttgattagactcaaccaaactaaccaaacaattaataaccgcatccagtttattctccaatgtatgaatatagtttgtatcactattacttatacttggatttggtaagttgtttggtcgcttatttttagagcggttatcaatatcgttagcagctaaagctaataatttgtgtgcttcgttcgctctacttggatcagtaggtattatccactctggatatccttcttcccctaagtggtacaatccgttatagactttgccaccagtagcatatgcgtaatcaccagcgcgtttgaacgcagctctccatgagcctgttcttggtacccatttacccacaatatatctcatagccgatatagcttgatgagttgggttgagaggattattgtaacccgactttgcgtacgctctaaatgaaggatctatcatttggaacatacctcttgaaggtataccagctcttgcgttgctatcccaattattgactgcattagctgtataattggattcacgactcgcaacacgcatcatctcgttagtaatccaactcgccttataccttcctcctaaaatattttgagcagccttaatagctcgtctagcattagctgcaccattaccaccgggtgtacttttgccgcccccattattctttcttaaccacggtaacgggtctctatgtcttccattccaacgcatctcataatgtaagtgaggtcctgtactaaaccccgtattccccgatataccaacagtctggccgaccctaacttgttgaccagttttaactttatatttagataaatgtgcataaataacttctaaggcgccctttacaattttcacccattttccataaccaccattatgaaaaggcataacttgtgctctaccattaatggttgatggaacaggttcgtaaatgtaatcaaaatccagaccttcatggaatgggcgtccggtttctcgtgtataagcagcagtgtgaccgtataagtaacgtaatttattcatatctaatacaccgccatcacccgactctgcgaaagcatcctcaagccacttgattgcacttttcttaatcttagaccatgcagcttttgttatatcgccagcaatacccatacctttagttagagaactgaaatcaactccaaacgcttgaagtacataatttaaaagtttgcctggattatcgataaagtccatgacatcaccaactttatcgccaagccactttgtacctttacctatttgatcttttgtccagttaaatgccgatgatgcaccggatttaatatctttccacatagtacctatgctaaatcttggaagcgttccatttaacattgaataagtttgtgcgccgttatatacttttgaacctttaggtaaatacgccgtagtatctgtatttggtgtgattacacgtttaccattagggaattcaatcatttcatttctaaaaccatttggaccatttccgcgtcccttatccccaactgtagcgaatgtgtcacgtgtaatcttaccgttcttaactaatcttgtagtagtatgtgtgtgctctgtaccagtgtgtaacctaggtatttcatccatacctaacttaccaccgacccagtttaagccttcaattaatttattaagtccttttttaatagcatctaccataccaccgatatgatctttaattttaccaatgatagattttaaaccgtcacgcatgtttccgaatatattacgtactttatcccacaaacgaccagctatacctactgtattgtctttaatagagttccaggtgtttgacatccaatttcttaatttagtaaatatatctttcgtcgcattccataaacttgtgaatttagaccttacacccgtaaataacgaatgagccttgccgacggtattgcttttgatattattccacgtactagataaccagtttttcatattagtgaaaatagatttaacactattgtataagaaaccaaaaatacttttcgtcgcattccaaattgccgataaagattttgtgaaaatacctttgataacactccagataccggatattaaacctttaagtaatccaccaaagtatctcactacacctagaattttacctacaaaccacagttgtattaaattccaaattaactgcacagtacctttcagtatcattacaataccgtcccaaacacctcgccaattaccagtgaataaacttgaaaagaacttaataaagccaagtattatatttaaagcaccttgtattactccttttatattctcccaagtactgacaatcaaggctttaaccgccggccaaataaattgcatcacttgccaaatcgcaaacatgattggtttaataataaagttaaaaataaattcaaaggttgctttaatgaaaccagctatattttgcaaagcttgtgttatttctgagccgttctctttccagaaagaggctaattgagcgcctatctctttggcgaaaccaacgattgcatcaactactttaaagaaagttgttctaatcgtattaactacattttgtattcctgctacagtttcgggtggaaatatcttctctagggtaaccgcgcctttactatcacctttgaataaatcaaagaaaccttgtaacgctagtttagctgctttaaatgcgtttgctacaccagagattgcctgatttacaatatttctaaaagtttctgaacgtttataagcttgatagaaagctatgccaataccaactaatgcacctacaattaatgttataggtaacgttaaactggatatcgacacacctaaaatcggaaatagtttaacaagtgatgcgattttagttcttaaaaacgcgaatataccaccagctttattaacgtttattaacaagggtcctaaaactgtcattgcattccccatcacgctgataaataaaccgaacataaaaactaaaggacctaaaactgctgcaaataatccaaacccaacaaccgctaattgaattgacgttggtaatttagtaacccatgtcactactttgctaaaagcacttactataatctttagtgctggttctattctgtcataaatcgttaaggctagttcttctaattgcgaccttaaagttcttaatttcccacctaaaccagattccattgtatcggccattcttttagatgcgccggtagatgaatctatagatctggttaacttttgatagtcttcatcagaagcatttataatcgctaatgctcctgacatcgcttctttaccaaatattgtagctgcagaactagcttgttgatcttttgaaagatgtttaaatttttccctcagttgatctaaaagctttcgcataggaatcattttcccattactatctgtaatagatattcctaagcgctccatttcattccccatagctctagttggacttgaaagattggtgaacattgttcgtaacgctgtacctgctttttcacctttgatacccgcattactcattaaacctatcgcaatagatgtatcttcaatcgtgtaacctaacgcacctgctacaggagcgacatatttaaaagcttctccgagccctctaacgtccgtatttgccttcgagctagtttgtgctaaaacgtccgcaaaatgactactatcctttgcttttaaaccaaatgccgttagtccatctgtaacaatgtcacttactgctcccagttcttcgccagatgctgccgctaaatccataactccgcttaaaccttccatcatttgcttagaatcccaaccagcaagtgccatgtaatttaatgcttcagccgaatctgatgcgctaaattttgttgttgcacccatttcgcgagcctttttcttcaaagcttcaaactcttcaccagtagcacctgaagttgctttaacttttctcatactatcatcgaattcaataccttttttagctgctacagcaaacccagcaaccaccggcgcagttacatacatagtcatgttacggcctacatttttcatactgttaccaatttcttgaagtttaggaccaaaattattaaagttggtaccaagttttcctattgcagtatttaatgctttctgctctctttgcatgtcttttaattcttgtgtggcttggtttaactctcgctcatattggtttaatttagcgtaagcttcattgtatttagcagccgcagcttgtgtctttgcactgttttcaccagtttctttactaagtttgtcataactatctttcagctctttagtaatctgggcttgaactttttgttttttactcaaaccttcgacttttatcttcgacttttctaatgaattatcatatctagaaaattgtgataaattagccgaaagctcacgcgaaaccattttcatttgcctatttaaacctgtcacacctctattgaatccagaaccatctaaatcaacctttatgaccatattacctataggattaggcatttaaaaacctcctttcttccaagatgtaaataaaaaatcaacctttaaaggctgattaaaaaatatctttaaaacttttcgcagttcgctttgtttcaatcttcgattcgacaatgtctaaaaagaagtgtatcggcatgttagccactttttctgcatccatgccgttttctatcaaatctttagctattttcctgtaattgttgtagacagcttcaggtgttaaatcttcttttcttatttctgattctctgtcacgaacttttttgtctcgctaggttccccacctgtaatacgtccaattaactgaccaatcttttcaataccttcttgaccatttggcaatcctttttgaagttcaatactagtgaattgattgtcaaaagcttcaacgatgaaatccaaaacttcttctaacacttccatttgtaaagccatgttgtcttcgatttcttcttgtttacttttgtattcttcttgttctgtcacgcttaagttattaaattcttcttctgttaactctttaaaatcagaacccttaaatgctttgttaagtttcaaacctaattttgaaccttgaattgtttcaaataaagtaataatcggttttgctaaatacttttgatattgtggctttcctgtttttgtaaatcctgtaattaattcaattgatgtacgttccattgttaatttcctactttctttttttagtttggccaaaataaaaagagggcattaagccctcaacatttacatttctaaattagattgtactgtaatttgtactgtgtcagtttgcttacctgaagtcgcagtgactgttgcactaccttccgctaaacctttaacaagtcctgttgacgacacgctagcatacgtttgcccttcagttactgcataagttactttctgcccagatggttgtgttgtggctgaaagttgctttgtttcgtcgacttttaccgtaacttgttcatcactgatatttacagaagttacttcaactttttcagcttttttcatttctttttctaccgattctgtagtttgttcaccacgactagacataaactcatcataagttttaccgaatgtttccatgaatacatagtcacgacctgctgtacttcctttcacatcataaccagtaacatgtgaactctcgtcaaataaacgatcaataaagttaccttctacatcatcattttggaattcaaccttatcttgttttgtttgtcctttgatgcttgaacgtgtgaatttacctttgaataaaccaacccattcagaagactcatcatgattacgtctttcgaatacaattgctacatctggcggaatatccttagctccatatttataaccgcctgtaccttttttagcaccattcaagaatgctttatcgtcaacaggaacagtaacaaatgttgttttaacacttaatttaccattagatacagcagtcgcagcaaccatatcatctccataatcttcttcagtgtcttgtggtctatctacttcaatctcttttaaaaatcgaattcgtgtcccagcgcctgtttcccattctttttcagtatcttttaaaatcggcgcataataaaaattagatacaccaatcgcaatacctgaaacgccagtatccgcaaagtgttgtaagtttaattttaaaaatcttggtgcttgtttcaatttttcaatcatttaattttcctccaatttcattgataaaatcgagccttttgctcttataatatgtctgaatgacatgacgtcactttcgtataacggttctctgtaataacattgaaaattcattgctttgagcgaatcgacaattctttctgcttgttcattcggttcatcttgagagcaccaaacatcaatttggtaatgatattctcttgaaaattcattatcatcagcgtatgcgtcagggttaaatggtaatgggtatatccgaacaataggtttgtcagttttttcgtgaaaatggtcatctattgtatagttaaatacatttgcttcatctgtaacgctctccttaacaatcgtatctctaatcaaagtagtaatattaatcatttttgcaacctcttagcagtatcaagcattgtttttaaaactttgtttttcccttgcttttctgtttttgttataaacaattgtggtttttggtacattgttccaaattctgttgcatgaatacgatgtgagacgcctttagcgtaaccaattgtaacgattttctcacttgtgtctctgtctgttttcacattagaaacagctatgtgatcacgagcgtgttttttagtatctgcaaaaggcgtattgctttttaaaagcgggactaatgacatagccccagctttgacaattacattactatttaaattcatttttaaaactgcatttttcaaaccttgttcaatgttattactttcaattcttgcccccattaaatgaccacctcgccatagatacgcaaataagatttatcttgataatctggctttacatatttgatgttaaatctttgcccttcatgcaagacgtaatgcttatttgttggtttataatcacctcgtgtatctctgataataatagttttaatgaatttgctacctgtattgagattcgtttgagtgtcggattctttagattcttgaatgcaagcgaaacaagagtataatattttcgtcttcggtttcatcggatttccgttcactctctcgcttacatcttcacaaaaatctatacgttcatttaatttattggaattaaatttcatcattttcactctccaaaaattgctcaaatgaacctctcaatttatgcaccgtacttaaaaccatatgtggcgcaagcgataaatccctatccaaataagcaatacggttttcaaaatagtaacttgctaaagggtatatagcacgagcaaatagaggatgacttttaaaccaatcaatatatttacttggttcatccgtaacagcgctagctatttcatggaatgcccaagagtaatatatttctaataagtcgtcctctgaattgtgatctattttgcaatgcttttttaataacttaagttcctcagctgttaattgcattcaatcacctattcttcttttactctttcaagtattactccatgctctttcagctttttgttaacatattcagcacgttttactgtcatttcaacacgtttacctgactttaaatactggcctttttccaagtcagtataagatttcttcacttcatacattgccatagtttatcacctctttataaagtatcgagcgcttattatgcttctaagccaagatcgccttcaccgcgttcactatcatcatattcaatcacaattgctgatttataatctagaattctacagtcttgacgtacagcaatcattaaacattctccgaaatgcatgtagtcagtccatgatgcttggtattgagagcggtcaaataaaacaatcgcatcttttaagttaccgataatcaaagtgttattacctttttgccctagtacttcatcaggtaaaatttcgattttagctcctaataaacgctgttgcgttttttctttaacatctggctggattaaatagtttcctagcttatctttcattttgtctaattttgcaaacatagtttgcgaaacaatcgcaacattatgttcgtaatttggcttaacattcaggttaatagcatctttaatatcatctaaagattttgcttttttaacttctaatttcttaccttctttttcaaaacctgaacttgtagaacccgttgatcctttagtgataacatcaataattgctttgtttcgtgttgctgcaatagttcgcgccatccatagtttcaattcttgcaaaacattcacttttgcatcttcgattgcttcacgtgaaattcggaagtaaccacggtgtgtattaatgtcatatgctaattggaagaatggtttaactgctaattcagggttttcttctaattcttcaactttttcaagggctgcaacttctgattgtcgtactaccggatatttaccagaaccatttgtaacacgtttgaccgtcacatacttatcaagattaaactcaacctcttttaattttaaaatatctgtaacaatttcctctggaataactacaaatcctgagtctgtttttaacgaaccaccttgaatatcattgcgtgtttcaagatattcagtaaaatctctaacttcttgtgatgttacctttgtgttttgaatcgaaatacctaaatcattaatgtttgcttggtttcgataagtacgtgcttcgtttacttccactgattgttgattgttttctgaagttccatctttttcttttagcttatctaattcttcttgtttttcttggatttgagaacgtaaatcagtaatttcttgttctaatttttctgctttttctaactcatcgttattaagtgctctcgttgcatacttcacctttaaatcaatttgtcttttaatgtctgaaatctcagattgtaactcttcttttgttttcatttaatttcctcctaaaattggcataaaaaaatagacatcgctatattcagcatgtccaatggctgtatttgataatggtgttcaacttcaccaaatattatttaatatagagtgtttctttagtcttatttctaattcttttttacgttgttcttttttaacggtttcaatactacgtaatgctggtttaacatcagtgtctttgtaagccggataagtcactacagaaacatctgtaagttcacgaattgctgttaaagtacgtttgtaaatgttttcttgttcatcaaaacgcacttcatcgcctttatcgtcaagcataaaaccaaacgaacattgattgatgttgcctacacgcatgttctcatataaatcacgtgcaaatgttgtgtttggtaacttacaacgatatttaagtccaacatcatcagtttcgagctccaaagtacccgattttgtcctaccaattatttgcgatgggatatgatctactaaacaacgtacatcagataaatcagtgttttctaaagcgcgacgtgaaatcgtttctttgaatccaccaagattttcagaccaagtgtcaaactttaacgcatacccctctatgaccatttcgttgttatcatttgagcgtacctcaataatgttgccaactctcgtttccttactcattttcctcaccacctttcaattttttatcagtagctctcgatttattcatctgatactcatctacaagttcaatatttacatggtttaaatcgactctgtgaatgctaccattaccgcctggtattggcgctaatccatcacgttgtctaatttcatcgatattcatctttccagaatcaatgttaattttgtcaatttcagcttgtgttttttcatcaacaactcgtatttcagtggtatcaaatttaaattcacgattcacatattcatcattaaacttaaaattcaattctgcacaaacgcatgtaatataaggttttaaagttgataagtaatctaaattagcatccgtgatactcatgttcgctgtttctatgccgaacttatgcaatggaataccaaatacacctgctatttctcttgttgatgatttgttttctctgataagctttaaaacttctgtatcaacttctaattgatcaaacgtcattgattcatcgagtacgacaactttcccagcttgtttagttccactaaaacttttgtgaaattcttctctggcacggtctcttgcttttttattatctaatacacctttcattttcaaaataccaccagcatgtgtgccatttcgcaagaaattattaaggaaatcttttccattgttatctgattctatcgtgcgacttaatgtgtctaacagtgacaaaccatttataccatccaacgaataaaatttgatgtctagcatatcctcaaacttaacattacgttctatattatttccgttactgtctatcctttgatgaaaataatacagtcgacctcttgcgtctgatttcaattctatttcggatgtctttctgaacgttaaattcataggttctcctgttttatcacgtgtaatttcaatatagccgtgcgatgttagtaaggcactaacaaacactactaatttgaatatatagccgttatacattgggttaggacgtgtatttaacaaattaacaatcctgtcactataattaatttggccgttcactgtcaccctaattggcatgcgcgccaaatcagaagcaatcatcataactgcagtaaagatgtcgctatgcctaattgcttctatatctttatattgtcgtaattttgttccttgaaaacctggcaaagtttgaaccatcatttgcaaatcatcttcgttgtattgcaagtctcgtttttcatttttataaaaaatccccacaactactaactcctttcttgattgctttcatgatttaaaatcaacgaaataacaatcagtgttataccaatgcataaaagtcctatattttgaccgaatgctttatacatagaaacattaaccacaaacaaacctaataaaaaaaggatgctaaccaaattagcaaccaagaaattaaaaaagacatttattttattcaagtccattttgtcaccacctttaaaatccgaattcttcgctttcatatttctccgtccaattttcttggaattcgtgcattctagcttcagtgaaagctgtgataatcgaaataatcggatctattttttgacgattcatttttttatttattttcacattgtcttctccgtcacgaatcaaaacggcattattaactgatgttgtaagtaacatattatcgttatgctgtattctttcatctgcaacccacattctaaattctttaatagattgtgataacgccttaaaactttgtcccacttcaatgagtggccaatctaaagccattgattcgattgttgttataaaactttgcgcattccaagggtcatagcaaacagcctgtacattcaggtcatgcgtcgttataaatttcactataaaatcgataacttgtttataatcaatcatgccgctatctgattgtgtagtctcagcttctccacgttcaatcgctaattcataatttattttgtctctcttagatttttgttctaagtttgttcttaatccaatgaaagaatgactatgtaaaaacacttttttatcgtcgttagggaaaataaaccctacagatgttaagtcatccaatctcgataagtcgacacctatatacacatctttaccattgatattaggcataggcgttattacttgttcccaatctgaaatatctagcaagctatcttctctttgcgcttgccataaattgaagtttttaatcaaaatcttatgatacgatgtccctttttctaattcgtcttgtatatcagcttttacattttgaagtatagtttttctatgttcttttgattctaaaagtggcattgctttaatccactttgtttcatcttgaacttcttcttgtgaatccatttcagcacaatatacaaaataattatcagctcttacttcttcatttaaaatacgtttaatatacttatactcttggtacatttgactatttaaattgtctccggccgttgaaacaagtagggttaaaggatttttttgtaatgtcatacctgttttaaaccttgagtacatctcatcatcaggcatacttgccaattcgtccaaaatagcaactgtaggatctttaccatcaaccgcatctgggttattggaaagaggtgcaaacactgaactacttaatacatcttcaatgtctgtctttcttacgtctgttttttcacggataaacttgcttttacttcgcattaggtttacttgttggcttgccatcttgaatattgtttgcgcttgcttataagtagatgaagctacataaatttgtctattaaatttagggtattgtccaaacaacagttcgttaacggacattcccgatacgattagagacttaccttgttttctagccatacttatataagctttagtaaacattctgtattgacctctacgccagccgtataagctcccaacaatgaatttctgaaactccataagaggcatgggctggtttgttttagggtctggaagcatttccacaaatttaattgctttgttagacaaatgattatcccaatggcaaccattcggcgggttctccataaaagataggtgacgtttacatacttgaatattcttcaaacttgccaaaatttctcctgaaactaccttttttgcgtatttagtaacataatcagtcattactaatcactcacaaattccatatatggatcatcatcttctttttcatcaggaaccataatacgcaatcggctatcaatagttaatcctaaagtattagctgtttgttgcaatcgaatacccgctttttcctttatgttgaacgccggattaaccttttgatttcctttgtcgtcttctaaaatcaagtcttcgcgctctaaaatcaaacttgctttaacaaagtcactataaaaactacaatattgtgctaattgtgctttatctaagttggaaattggcaattcttgcatgtgcggtaatattcttaagtattcttgtttcgctatttcatctaaaaagtgcggtggttcagtatcgattttagaaaatttatttaattgagcttcttgacgctctttttcaataatttcttcttttgtataattcttgttcgaatttgacaaaagcttcttaggtctacccgccataaattagcacctcctactaaaaaaacttaaataaagggaattttttgagaagaaaactctgctccgttctccagaacctttcattgacgcccgtttcatctttgggggacttcctatttttatcttttttaatatttcttcaaatcttcttttgtcttttggttatggcaagcatcacacaaaggctgtaaattacttttgtctaatcttcttgcccaatcaatttttgttggtacaatatggtcaaccatagtcgcttgattgccacaagaaacacaaataaaatcatgttctaacaatacaattcgacgcatgttttgccacgttttcgatttataaaatcttaaatactctggatcgtttcgacgtctcaaatcattgtaattttcatttgcatattgcttgtgtttatcacaataactttcattatgattaatcaatacattacatgttggatgaccacatcgcttcataatagacaatgcacatcactccttgtcgactttcttaacatcttgcacagttacttgtctatcatctttatcattgctaattaacaataagtttcctatcgatccatcaacaagatatttactaccttgaaacaatactttgtctccttgttttataccattgtctaaattgatagtctgattaggtttattcatcaagatagtgttaacactatgaccagctatctcatccaagttaatacctaacacgttagtaagattagctatattccacaatgcttcgctaagttcatttatcataattcctttatctatcggtacattacaaaacatatgctgtttaattagatctgtaacattgcctgtagattgagttaaacctaagccgtaacaagtaatagattcatttaaattcaattcatcattgtgtgtacgtgtagctatctcttggtactttgatatctccattctccacctcttgtttataaaaataaaaaccctcacttaatgtgagagttcaaaataaatataaatgttttgctacatagcaattataataaaaaacaatatgtagcatcaaaattagtccgatgtgtacgatttgtacgatttgtacgatttgtacgatgtgtccgaactgtccgatgtgtacgatgtgtcggtttcttgttgcaagttataaagtatatttactatatcttttactctagaataaaaattgtctctgcctatatcaagaatactcataatcctattatggctttctcgttgttttaacatttgtaaaatatgataatctttttcattcgtgatgtattcttcgtattcatcaatgaacgctatcttattaatcaagtaatcgtactttctaagcgctttgtttttgtttataactttcactaacactttattgctagtcgtgcctttagcttttggcatcgcagattgataaccgtattgtgcaattgatgtactttcgttatcgtagactttactgtctattatatttttcatccacttgtagttatctatcatttcacgtatttctttcctgttatacatgcaatacctccgataatataaattactttttaatatcgttattcattcgctttaattcaatcctgtattcttttaacccgttgtatcctttagttttaactacttcatcaagtagataatcatttatatatctgagcgcttgtatctcccttgcacgatcactattaatactgatacaaactaatagcaatatagcaaatacaatagtcatagtaatccacatcactcacttacctccgctcgaaagacgtaatcactcggcgcctctacatcatcattagccgtcatcataatatatacttgctccgttacatacttacctagctcatacattgctagcaagaataatagtcttaatatttgtttaatcattatttatctaccttctttacttcgtataagaccggatataaatttaaaaagtgtattctatatccaattgtcttaacttctactttatcgcctacttttaacctagcttgtatatctgcactatcaaatttctttttgaataataagtcggaattttcaatgacttgcttgttgtctaatacaatatagaacttgtcttctttatcttgtctcttgttatatttatctgtaattgttccttggtgcgtttctttgtgttggtaactagccactgtatagataggaaatgtgacaacaagtaacaatgcgaatatgccgaataatgacagtactccaacaataaagatatcgaaccaatccatatttttaagttttttaatcatcattgtcatctccagtatcaattaaactaggcatcattcttaacatagcccttaattcatgttcattcatattagccatcataggactgtaaaattcactgtctttatcattaatttctttaatgaaatcatcttcaatcttagctttttcttcaggtgttttatttttatatttcttgattatttcagtgtactttttcgggaatttcattttaggtatgttaatcgtcgtttgcctccttaataaatgtaaatgattcaatctcatctcttttaacccatacttcattgttgaacacatctttgaccggaagaaaatcctcaaacactaggttcataacaagattaatataatcgtcagaagctaaatctgttgttgtgtaataaactctatctgaaatagttttaattttaaccaccgtcatttcccacactcccttatattttcaaacaactgactcactttaataattgcatcccttttaacttgcgcctcgtacttctctttcgcttcttctttactctctgcctcaacaactgtaaacgtctgattatctctagccacagtaaaatgttcgtgtggtagtcctgttgaatctttgaatgttgtgactaagtattgtgtcacttccccaaaacctccttgactcgatctaaaatgtctttacacgtatccttttcctgcgtctgctgttccatcttgtctttcgtggttccttttcattttctttttgtatgcgtcaatgagttggtcgatagaatataagttgtaagctatgtctatcactataacaattgcttgttggtcgggataaaattctttgaatattatctgtggtgtactaacaactgcgtcttgagcaaattctttatctttaaaattaaacattttgtgaaattctgtatctttaaaacttgattcaatcgcttcttttatctcttctgatgacactcctacttgattcgcaatactcaatccaaacgccaacatgtcagctaattcatcaagttgtacgtctaacggcttacctggtttcttcttccagttcttaaacgtttccaatgtattaaaccattcaaagaattcaactacatatgctattttgctatctcgtaagttcagcgttggtattctatcgtcgaactccttttgtatttgtaataactcttgtaactgatcaattgttaatgtgttagtcattttcctgtgcctcctcatatttatagacaacttgacccgtcataatccctactgcttcatcaagttcaataccttctttaactgaatgttgaatagcatttgtcattccctcaagtatttcatcaaacgcttgcgctttcttatatacgtcctcaatctcttttagtaatccctctgtgtcattgccgttatacgcactagcacttataacggattgttctatttgttcacggttattcattagtgtcttcctccataaaagttttattgtttaattccattccaaatttaactctttcaccatctttgccaaattcgtttattaaatctttttcaacgctcttgcaatacctatcccatgcacttgctttcttctccagctctttgttgcgttctcttaacttacctatatccccaataagctcatctcgttgcttcttgtactcatcacgttgttttctcatcttcttcaacctagcgtccattacacctagttggaaccctgtttcatagttcattctgttacctccaataaatgtgatgattcaaatatgttgcctttaacctcacagtcatatctaaggaaggattttatgtctatatactcaaagtaatcattttcggagactgcgccctcaaacataaaatcttttaattgaataccatttacaacatcaatagatattactgctctattaattgttcctattacagattcatcgtctggcatctctaatatttcatcttcaaactcaactatatctcccgcatatatttcgttgttgtttttgtctttaagtcctgtactttgcataagttctacatctttgaaatctcttgcgtgtattaaagcttctgcttccgcgtagttttcatagtgaacttcattctcgatgaagtcgaatcctacaacatcgtgtattcttcctgtatattcgtcccacactcgatatttaggcatcattctactacctccactttttctacttctatgcttgcagttttgaatgggagctttttacgagtcagttttaataccgtattcgtggcttcttcctcattcgtactttgcacaaaataatgcttttttaatttataattacatttagacgctaagaacttgatacaaagacttactttataggtttgcatcattctaccaactccccatctttccaaatcaatgtcatcgtcatgtcatcgtttaagatatagaatgctttagtaggaaaaatattgtcgtcttcaaaacgttcgttcaaactgatacctttgtgtaatgcggatttatagactccttcttgaatctcatatacctctaacaacctatcaaacttagtctcttccgttacttctttttcaatatcaactatgaaggggatatcaattggaataaaacttgacgtcgaacacttatttgtatttggatgaaaacgaacgaatccatcactaaatcctgttgaaaaaaatatttttccttgtgatagatccggattttctcgcgcccatttaattaattcatctaatctcatttcttttttaactttgattttcattgttatatctcctcttgaacagtaaatttatcgttaattgatacatatccagtcacattacataagatgctatcaacatgaaaagtcacaaaacagttgcgctcaacatcatttgaatagaatcttttattacctgataacttggggttatcccaagcccattggataagttcaggtaaattcacttctttttcaattttgattttcatcatttccaactccttaaaataaagttagttgcttctgttcctcatattccaaaccatgttgctttatatatttttcaagctcttccgctgtatcaaatgtctttttcacgccttgccaacctggtacgatatgcccgtgaaagtaataagtgtcatttaatacatggatatgtgccactcgctcgttattctgatacagatatctcttagaaccgaaaaattggtttaagtattctttacgtgcgctatctgtcatgtccattactcccacaaatcaaatgctctatcgacataaaacttcgctttcgccatatcctcatgaccattctttaacggtgctctagacaagtatttaattgcattacctattgcgaatgctaattgtggtgggtactgtgccgtaacttgttcaataaaatctataatttcaatgtcgccgtatgtgtaatgtgctggttgcttaacattgtcttgcatttcattcatatctacttttctgttactgattatgctcattatgcttcactccatttcttgaacatttggttataagtgacatcgaaccagtacggatcacgtgaatgtttttgaggtacattaaacaaatgtggcttctttcttcttagctcagcttctttacgtcgttgcctagccatttcacgctctcgctccaaagtttttgttatttgtatttctctatagtcgtttagcttcatgccgaaaggtgcatcaattgcttccgacatctcccaacccttcgcaactctgtttctaactatttcgggcgtgagtcctttctttttcatctgctcattttcatattcagtgtatttagaagggggtttttcttgtggtggcgcaataagcgcatcgcccgttagcccttttgctaccctgtaattaattagtcctttgcttaggttgtactttttaactatttcgctaacagtcatcattttgccgtcaacctttactttcttaggctttactacattttgtattaaatctttccccctcgcccctctgtcgtacctagtaatcaatgtcgatactttgatgtcgtatttatccgatacatcaataagcgtcatcaatttaccgtctattctcactttcgtttttatgcccgccatttattccacctctacatttacatttctaatttttaaattgtcatactctagtatttcgccaggattgttatataagtaatctgccagtgcatctttttcatcatccacatcatcaaaatgctgatattcaacttcggtaggtattcttatatcaatcgttgcatttatatatgcttgttgttgcattaaatcacttcatttctctttttcttttacgtctgactttcactaagtcctcatataccatccattcttgacctgtgtatttaggcgctttacatatccacgttaaattcacatctctatactgatatctgaatatcttcgctttgatgttggcaacttcggtcgccttacctttaacgtctacaacttcaaccagtttcccttccttccacaaagagaaatcggctatatacgtaatcggtctttgtttcccgaatttaggttgtaattcaaatttcggttgtatttcgatacgatcatagttagtgccattcatattactttctaaatattggtaatattcgcactctactttgctatcaaatacaattcctttgtactcaactttcttagcgttgtatttactcattgtgccacctctaaatatcaaatatcgttgcttgtaatcctagctcttgctcatataaaagcccgtgagcacttttgaatcgttttaggtcactttcagtcatgattttcttttcgtcgctgaaatgggctcctgtgagcgaataaacttcatttacgttgtctttatacttgatgaccttaatatcttccgtgccatcttctcggtataagtaatatttttctttcggcatttttaacactccttaatattcgacgacagcggggcgtgtgtgacgttctgcaagtttttggataaataggtcatataacttgttttcgtctccctgtgcctcgtctatgagtttctgagcgtacacatctgaacactcaagtttagtttttaaaaattctttggtaatcatagttttaaacctctagtcctgtaatcttgaccgtccatcttgataagcgttgtgttgctcatgattctgctgaatatacgttgtaagtctttgttttttgtcatttctttctcgtctaagttggtagtaaagatattgtgtttgcctattctactttcgataagctcaaacatcttactagtagcgaattcgttcatgttgataccgtagtcatcgaataccattaaatcgacatcacttataatttgagccaattcctgttcagtcatagcagtttggttgttataagtgtttttaattgttgatatcaattgaggtacgttcatatatagcactgtgtagcctttagctttaactgatttaacaatactcattgataagtgtgatttacctgtaccaaatgagccttgaattagtagcgattgtttattgtctaacgtgaaattgtttgcgtaacgttcgcataagttttttgcatagactagttgttcattagtcggattgtaattatcaaacgttgctttcgttagatcttcgttcattatcgattgtttgaatatgcgttctgcttttcttcgtctatttctcttgtgatagttttcagttgattgtttggcgtactctatcatttcgcagtcacaaccatgtttgaattctgaaccgtcatcaaatttgtaatagtcatactttcgtccacagttctcacatttcaaatcaaacgcttgttcaatgatttgtttttttaaagttggtttctttgctaagttctggaatgactccactttctcactcctttaaaacggtaaattttctatacttgattgcgatgcacgctggaacgcatcgacatattggttatttacttctgctttaatctcttcgctataatcattcatatagctttcgttagttaagaacgttttagggtacttttgatattgtttgtctgtaatagtttttaaatattctcgagtaccttgcatgatttgctcaaaagaatgtttctttaagcatgatttgaatttagtaaaagacatcttcttatctttcttcttgtcgtaaagtttccaccattcctcaaattgctcatgcgtaacgtcagttgcgctattattattaatacttgtattatttaatcttgtaatattaatacttgtattattctctttgacatttgcgtcaataggggtattgacagaattatcaataggggtattgatttttgcgtcaataggtattgacgattgcgtcaaggggtacatcttcctttgtttaacttcattaccttctttgataatttcaatttttaaataaccaaacttggtaaggtttgaaattctacgagatatagtttctttaacaacgttgtataaagttgcaaagtaaccattacttgctgtgcagtatccgtacttgttacttaaagacgttatttctgcaaaaagtagtttttcaccgtcagtaagtcggttatcgtatctgacatttgctgttattattgagtagtaacttggttgatcagtcatattgattctcctttctggtataattttgttatcgctactgcgttagattgggggtgaataaaatatggaaaaaccttatatgttaacatatgatttaaactcacccggacaaaaatatgaggaattgagaaatgttataaaaaaggaaatttctaatggtcattgcaattattggaaatcttcatttttattccgttcttctttatcaacttcagaaatgatagaaaagttgaaaccttatctcgattctggagataagctgtttgttacagaaatagtcaataacaaacaagggtggttaacaaaagaacaatgggattttatcaaccataatatttttatttaggttcttttattgaatcttttgttatatcaggaaaacctttagaatcctcaggggtaaattttttaatttttttagcgcttctaatctcttccgccaagatgacgattaggagtgctatttttattattcttagtctattcattcctttttctctcctttcagcattttattgagcctctcatcaacttttatccacgagtcatgcaagtggtatttatcattaaacgacttaacgccaatcgcatgttgctcgttatgatgttcgcgacataacgctaatacatgtttgtcatagtgattcatcttatttctgttcatgcctctaccgactgcttcataatgcgctaggtctgcgtgaggctttccacaaattacacagttgcggttgattgtatcccaatacaatagtgctttatcttcacttaacaacttgcttgtttctatgctcataggtatttgatgatgaaacataaacgctataatcagttctattaactcccttgcaactttcatagaacagtcgcgcagactgatttcttcataacctttcataatttccaattctgtttgtaataattttctagttgattccaccggttctccccagtgaagttctatatctctacacattgcgaatatttttttgcgttgttctatagatagttttttattatccggaacctctacttctgcttttagtggatatccgttttctagtaagtcaatgtgactttgttcaagttcaacaccagtagcaacgacggaataagtaccgtcattgtctttctggtatcttgtaatgtattgcatttaaaccacgtcctagaacggtaaatcatcatcattgatttctattggtccattagcattagcgaatgggtttgattgctgactcattggcgtctgcttcccatttgcttgttgttctttttgtttcatctcatcagttttaggttctggtttattaactacttcatcgtctttattccaaacttttacatatgagagtcttacaaaatacttgccttgttcctcgttaaatttatttttaagtacaatagttccgattttgttaattaattgatctgtgtcaaaagttaaatctggtaagttcaatttaattcctaatctactaagtaactcgatatattgtttttcttgataatcttgttggaatggtgggacgaattggttgtgtttgtattgtttaccttcgttgttttcaaaaacaatcgtgaagtatctgttttctctgtcgttaaactcgacatttgcaacttttactgtaaattctccagctcctaaaaagtccccacctttcatgaatgcctcttgattagtttcttgaatgtattgtgttctaccagtgattttcataatttttataccgtccttttaattaatttttaattaccatttctaattgcttgtacaacatcgttaatacttggattaatgaaacgtttgttgttaattttgatgttgcttgagtgtcttatctttgtctcgaataaatttgatggttcagcgttaagtacatattgataagttttttcgccgtcttgctcatgttcttctattgtcattcttgctaacacgtcagattgactgatgactgctttttttatttggtcttgtgcctctatcgtgattgttggattgatagtacttccctcatcatctttgtctttgttaatgccctcgtgtccgcttatagcaagatgaaattgataatgttcttgtaatttagaaatataacgataaatacttacaatgcgtgtagcacactcgccccaatcattaaatgtcggtttctttgatttaccgtccatgatgtcgtccatagtgatatcacgtaacttttggattgtttcaatcactacaacatcaatttgttttccgttttctcttagttgttcaataattttaggcagcattttaatcactgcactaaaatgcttataattcttaatctgcacaactgccccatcttctgttaccgttgttccgtcctcatttatatctagtactaaggcattgttatcttttgttaaaaacgtagttttaccagtaccgaacttgccgtatatcgcaaatttataaaacttgtttgcattttgtttgctgatgtcttttacacctagttgcgttaaaatatcgacatcttgattagtttgttcagtcatgttctacctcctcgtactcaattgtttctgtcactgttttcttgattgctttgtgataatccatattgatactcgcttcttccataccgttaaactccctagctctatttttatttgtggagtaactaatatctgaattgttatcagttggtttgttagttatataaattggcatatccctatgacgaatgatataagttacagtctgcttcatagcgacctcctaccatttcatgactaagttaattagtctgtcctgttcatctgtgttctcttcaatccattcataaatagattgatttaatatgtctaatgctgtgtatagatcattctcatctgttatatttataccgtcgataaatctatcttctaaatctaagacattcactagaatgctgtaatcttgtttcttaactgctaatttaaaatcgaatccgtctacattaattactttttgacatacatcgccaattttgtagtacattgttgacacttcctttatttcgttttatattgaatatgcattaattttctaattgtttagactgttactcattgccgtgagtaacagtttttttattcttcataaaagtattccttataaaatatgaatgttgcgatacttgcgaatcccgcaatcgaccatgcagtagtgaagtatagaaacggcataagtacaattgctaagactgtaaagcacagtactgctactaggtagcttttataaatgttgctcattttattctctccttatatatttcattgaaatgctcatcgacgaatttattcatctttcttgcgttaaatctccagcgattaaaattctcatcagggtaatgcacaattccttgcgctcttagttctttttcaaatctaggatgaaatagtaatctgtccttgatagtctcatcagatgcaatttttaatttcttctttaagtcactcatgttccatacagggtctaatgaataaccaattagctcatcatattcatcttttgtgataagtacatgtgtttcaggtattggaactgttacgtttaaaatatgtggcatttctatctttcctttcgtgtataatgttgttatctcctagtgaaaggaggtgatattggtgtatattgatcctttaaaaaatgttcgtttttctattaataacgtaattagtaatgttgaaatttctaaaagtatggcaattaaacaatctttaaaacctaagtaccaattagatataattaatagaaacaacataaatttattttctgacttcaaagtagactttcatctaaacaacttaattgaaatgaattttaatttgcgtaattctttttcatctctaacatttcaaagaaatttattttctgaagaaacgataaaatcttttaaggaactctataggtttgatgatgagattgtacttcaagcacaacagaccattagagatttttatatcaatccaactgctatctcgactttggctgaagccatcaattcgacctatccaataaatgagcaaagtacctacaagagacacgatgaatttgtcaaacgtatcgaaaatgattttccacatcctttcaaaaagttaataagatggtctaatggcattgcagcaggtgctgacattcaaatctttgtaacaaactatataaacgagaacgatttacatattcaaaattcattgatagttgctatagtttgtttattaagttttttatcgacctattgttcacattctaaaaagtaataataaggcctaatttagttaaccttctttaacaactctgcaactgctcgcaacaattcagggttgttacttctttctaaacagtaactagcatgctttagtaatttgagttttaatttatttttttctttcgcgattctaaatttttgtaacatttgttatgcctcctttgcatttccaaaaatttaatctaacttaaattcttttccatctattaatccataaaagttattttttaaatgcggatgtctttcaagcgtcatttcaataaaacgcgggtctatcattaagtcgtagccatcgttgtattgaatattaacgggtcgtctattaccttcttcgtcatagtagtaatagatgacttttttgttttgagcttgcattgttcgttcctcctattaagatgtttgtttttctcctaaaaacttattaacaaagtattgttgtcctttgcctgttacttttggcgtcttactaattgatgtgtgaccgtccgaatgtgtgattgatgtttctttaatttcgaataactcacgttccattgaatactgtgtaggcatgttataatccacacccttgcgtttaataaggaatccgttttgacgtaaccactcaaacaatctgcgttgcccgatgtttataccgttttgtttaatgatctttgctaactctccaactaaaattgatgtcttagtagtagctactgcatctgcaaatacaatttttggtttatcacgttcaatctttgtttctaattgattgattgtgttgttagcaatttttaaagcacgttgcataatcatttctggactgttccatgctttctctacttggatgaaatactctctaaaatcaaaacctttttctgtacctgacatcatcgcaacatgtttagctacatcaagtgttaaagcataatcttctagttgtcttacagctccgttattaacaaccgtacttgtaagtacacttgtaaaatccctattttctttgaaatgcttcaagttaatttctgcccaagcgctaaaacgctttttaacttccaaagctttatataactctcttgcacttattgcgatttctccattttctttttcttgtatgttgaacatttcgccgatgttcgattttgtttttaatgcttgcatattgtttatgctcctttcgtgtataatgttgttatcaacctaaggaggtgataagtatggacataatcgcgatttgtatcgcaatttttagtttcttactgactgcacttaaatattatttagactatatgaaagattctcttaacatcgatgttatacctaccagaagctttaattacttggtcgatgacaaatcaagttacaacgatataacatttattaatttcacaaagtttcccatttctgttattgacgttgaatttgatattaaaaataaagtaaatgaacaaaaaacgttcaaacctatacgatataaagataaaaactactccattccatttactttaggaccttatgaaagtgtagaatgtacttttttgctcgaagaatatccagtgatatgggaatgggatgtgactatcaaagtcactaccaacaaaggaatctatataaagcctgttatcatagaatcgcggacagaacaccgagaatcagagccacaagtgacagagttaacatcagcaaataaggtaagtgctctttccaaccccaaggatggttttttaaagaagtttttatatcatttaaaaccttaaacatttaaaatcctccctttccgtcactctttaattggagtggcgttgattttttcgtctaactttttcaatgctaatttgtaaataactgaagcatgttcggttttaaaatgagattcagcaataattttcaatgtttctaatttatttcttgcatcaccgtatgtggtactttctgatagaacaccttctaaaatttgttgaactcgataatctaaaagttttaagtctttattgatgcattgttcgacacactcttctttggttaacgtgatttgttccattgtgtccctccttaagttcatataacatgaactttttctttaaaaaaatataagtgtattttctctaccggtatatctagtagttgtatagctttccatatttcactgtctttccaaccaactttaccgttgagttttaaggataaacttctctctgacaatttcatagcaattgcaaaattgtactgagtgccatacttttctactattttcccgctcaaacgtgagtagtcgtaacacataaaagcacctcctctcaagttcacgtatcatgaacttaactatactttacaccttgttttgaatcaagtcaatacaaaaattcatgatttatgaactttttgttgaatttttgttcaacaagctttattatgaagttatcaaacggaggtgcactaaatgagagaaaaagtttcaaatagacttaaacacattatgaaaataagaaacttaaaacaagtagatatcattaataaatcgaaaccttatcaaaagaaactaggtatatctttaagtaaaagcactttatctcaatatattaacgacgtacaatcacccgaccaagatagaatttacctactttctaaaactctgaacgttggtgaagcgtggcttatggggtatgatgtagattcttatcgagttcctgatgaagaacgtcaagatgaaacgataatgtcaaaaatcaataacatattttctcaactcacacctccccgccaagaaaacgtacttaactatgcaaatgaacaattggaagaacagaataaagtcacttctatagatggatataaagagtctaaactagtatcgtatattgcatgtggtgcaactggtgctggcataggagaagaattatatgatgacatattgcatgaagaagtattttttaaagaagacgaaacgccatcaaatgctgatttttgtattttagttaatggtgattcaatggaacctatgttaaaacaaggaacatacgcttttattaagaaagaagattctattaaagatggtacaattgcactcgttgtattagatggagtaagtcttatcaagcgtgtagatatatgcgaagactatattaatttggtatctctaaatccgaagtatgatgatatcaaagtcgcttcgtttagtgatattaaagtaatgggcaaagttgtattgtgattaataacgtatatttagcgctttaatataaatataaacaaaggagaaattgacatgaaaaaagcaatcttaactttaagtcttatatttattacctactacctcacttttaaatatatgtggattaaagaattaaagtattaattatgcttatttgaaaaagacgtctatttcagcagtgtttgaaaggaagtttataatgaaaataactaattgcaaaataaaaaaagaaactatagtatatgaagttttaactagtggtaatcaaccattcacttatgagttacctaaagatttatcgtcacataatgcgcgtaaatacttggaatttatttcacaaaaaatagatggcgataagttaaccaaagaagattcattatgattttactaatcaaaaaacgcctacaagtgtagacgttgaatggtggtgagaattttatggcggataaaaacaaaaaacaagaagctactcgtagtaacccaataaacaaaagttttgaaaagccgggtgccagcgaaaacttaaaaagcactttatcagaaaaagctaagaaaaaagattaatattcattcattaaatataaatccaatttaatttgttgtttaaggtctacaagtgtatgtttaatatacaattcatcgtttgacggtaaatcagatactttgaaatcttgtcgctcaacctctagtaaatcgaaatcgctaccagctgaattataggttttaagttcaccctcttcaatgattctgttttcaaagtctttaataactataaatactggtttaccgttgttattaaacaacttgtctcttttgtctaataagcttatacaatccaaattcataaactttcttgtttcattaattaaccagataatgaatttaacaattaaaggattaaatacaagcactgttaaaacaaaaataattagaaaccaaatatttgcttttagacctgtaagcaactgaagtaaactcaaattttttaaatcaacattattaaaaattataaaagtataaaaccatatcaaacatgtttcaatagaaaaaatcaataatacaggagtattgataatcttgtttttttcactaactaaacctatcattgttagatatttatatggtatgtaacctaaaactcctgtaagaagaagcgcccctagaaattgagtcatcttatcacctactttttattttattataacatatttagtacctagtactaaattttgggtagcccgcctacccttattattttttgccaattttgaggagggaacgcatgaaaacacgttgttacgatggtaaaaaatggcaatatgaatttaagcatgaaggaaaaagataccgtaagaaaggttttagaacaaagcgtgaagctaattctgctggactagacaagttaaatgagttaagaagtggttttaatatagataactatataactcttgaagaatacttcgaaaattggattaaaacgtataaacaacctgttgttaaagaaaatacctaccgtcattatagaaatgcattacaacatatacaaaaacataaaataggtaaaatggagttatcaaagataaatagacaagtttatcagaaattcataaacgactattcaaaagaacacgcaaaagaaactataagaaaaacaaacggtgctattcggtcagctttagatgacgcattatatgatggacttatttttaaaaaccccgcttataaagttaattataaagccggaaaacctacgaagtcagaacaagaaaaattcatctcggtaactgaatatgaaatactaaaagatcacgtcagaaagaagagaactcgttcatcattagcgttattcataatgatttgtacgggttgtcgtgtcagtggtgcaagaaatataaagactgagcatatcaaccaagtgaaaaacactatatttattgacgagcgaaaaaccgatacttcccctagatatatcagtatcgctaaatctgatatgaaacacattatggacgtcataagtacatttgcaattagctatgatggttacattttcaaagaagccggatctataattaaccttcaggctatcaataatgctttgaaatcagcctgtagagtcaataatataccaattattacatcgcacgcattaagacacactcattgttcttatttactagcaaaaggtgtatctatacattacatttctaaaagattaggtcataaaaatatagcaataactacatccgtgtattctcatttgttagaagaaaaatttaatgaagaggacaaaaaaacaactaaaattttagaaagtatgtaatttagggacccattagggactccaaacccaataaatactgttgttacaaggtttctatgtatccaaactggggcaatataaacgcgctgatttaatcggacaatcttcttatattaaaaataatgatgtcgtaatattcaatgaagcatttgataatggtgcatcagacaaattattaagtaatgtaaaaaaagaatatccttatcaaacacctgtactcggccgttctcaatcagggtgggacaaaactgaaggtagctactcatcaactgttgcagaagatggtggcgtagcgattgtaagtaaatatcctattaaagaaaaaatccagcatgttttcaaaagcggttgtggattcgataatgatagcaacaaaggctttgtttatacaaaaatagagaaaaatggtaagaacgttcacgttatcggtacacatacacaatctgaagattcacgttgtggtgctggacatgatcgaaaaattagagctgaacaaatgaaagaaatcagtgactttgttaaaaagaaaaatatccctaaagatgaaacggtatatataggtggcgaccttaatgtcaataaaggcactccagagttcaaagatatgcttaaaaacttgaatgtaaatgatgttctatatgcaggtcataatagcacatgggaccctcaatcaaattcaattgcgaaatataattaccctaatggtaaaccagaacatttagactatatatttacagataaagatcataaacaaccaaaacaattagtcaatgaagttgtgactgaaaaacctaagccatgggatgtatatgcgttcccatattactacgtttacaatgatttttcagatcattacccaatcaaagcctatagtaaatagtgctcaactaactaataacttgcttcgttctaaaaggacgaagcgagttatattgttaaaatttgaattgacttacattttaataaaatcatcttaacaactttaatttttcattaatacaagtctttactctacactcaaacaagattcatacactgcacgtcataataaatctatctattcaaatataaataaaagttacctactacattctatgtagcaggcaacttttattacttatttcttttcattatcattaagtacttttacaaacttcacattatgtgtcttccaatcaacttcatataatgctgataatttttcttcttttttatctacatggttttcaccagaccaatagccccagaaaccatggcgattccaatctattttaaactcatccattgatcttttataatgaacaacaaattgtgatttacctttgtcttttttatcatgtgacataacagctaaaaattctggattaaacccttcagacacagttacaggcattttgtctttaggtgtgaaattatctttcgcccataaatttccatttcgtgttaaagaaaaaatttcacttttagttctattatcactatcattagttaattgtctcgtatggtcatgtcccatattatttatcaaatgtgcttctactttccaacctacacctttatgtgacgtagattgatcaagtaatgtacgatatgatggttgttgataactaatcgtctctgaataattactctcttttgtaatatttccagttaagcctccacgattaatcgaaaaatctccacctgttttataaccatacgtatatttaacttctcttgattcatcctgattttttggtgcaaagtcagtcacatttgtattgttgttgtcatcaacattttgaattgaaactgaataagatccaggccatcttaatgtactattccaataaccatttgggtctaaaattctcaaaccactaccaattgtaccttttgctttaataaatactgtttctttatcataattaggttcagttaagaaattaaattgtaagctttgagtaatatttttttgactatcacttgttgtagctgtacgtgtatacattttagtatcaccatcaagattcttctcagaaacttgtttgatttcagaattaatctttgcaaatgaagtagctggtaatacagtgaaagtagtcgatagtgctaacgtacaaattgtgatatttttacatagttgtttaatcattagtaatccgccctttcaatattatccttctttataaggtttattgtcatcagaatatttatcaacgactttaactgttttatttttccaatcaacttcataagtgacaattaatctttgaccatctttatttttttctaaaattggaggtgcataatgtattccaggtctgtttttcaaaatatcttgatttcgtgtgtatgttacttcaaattgcgttttctcatttgacttttcattagataaataagttaaaaattctggattaaagccacttcttactaatgctgggtatctatattttgaagcaaagcttagttcagggttttctacagtagcaattctcgtatttctatagaataataattcatcatttctatttttcacttctccaccatacttcaagtcattcgcaataactgaccagtgtacatgccagttattatttttaccgctggcaattgtgtcataattttgctgattataactaatcgttttggagtagctatttgatgaagttcgtccaataccttttgttgaatcgaatttaccacctgagctatatgaaaatgtactgtctacttttgcagttgaaattttatttttcggcaattggtctaatatttcagttttacgatttctttttacttgaaaatctacatggtactcacttggatactttaaccaatttgaatttttttcttctttatgagattcaaactttaaatttgaatgaattgagccttgttttttaacaagtaatacattcttgtcataagttggatcatcgataaagtcgaattgtaaattttggagtatatttgttttctcatcatatactgtttcagttcgttttgtgattttaccgtttttcccaatatcatccggtgctgttgaatttttatctttattagtaacattacgtttgtctttttgttgagacttatcaacatgttctttcttattttggtcttgagagtctttatgagctgaatttgcttgagtcgttgctgctgataacaataaaattgcacatgataatgatgacgctattaaaacacgttttttatttttcattgttataaccttctttcgtatgattgatatttgttgatatgtatcgacatgtgaataatatcacaaaaacagagaatatatatttaactatttattaaatgattttgttaatattattaaatactttatcctctttaaaaataatgtgtgtacaaagtcattaatttagcaaatatttttatttagtagttaataaccatcgatttgaaatttatatataattattagctaaataatatcctgcatctttctcatacaatttactataaaattaagcatatccgatatcagcgttaataagatcgttgatactagacagttaatttcatagaacgaaatcaaataacacactactttctgcattttaaattatgtttaagaataaaaattatgtttatataaatatatatactactttgaaaggtgtgagcttaatgacaacttttagtgaaaaagaaaaaattcaattactagcagatattgttgaactacaaactgaaaataataatgaaatagacgtttgtaattatttaacagatttattcgacaagtacgatattaaatctgaaattttgaaagttaatgaacaccgcgccaatatcgttgcagaaatcggtaacggctcacctatactcgcattgagtggtcatatggatgttgttgatgcaggaaatcaagataattggtcatatcccccttttcaactgacagaaaaagatggcaaattatatggccgaggcactacagatatgaaaggcggtttaatggctttggtcgtatctctaatcgaattaaaagaacaaaatgaattgcctcatggaacgattagattactggctactgctggcgaagagaaagaacaagaaggtgccaaattattagctgataaaggctatttagacgatgtcgatggcttaattattgctgaaccaactggatctggaatttattatgcacataaggggtctatgtcatgtaaagtaactgcaactggtaaagctgtccatagctcagttccatttattggtgacaatgcaattgatacactgcttgaattttataatctatttaaagaaaaatattcagagcttaaacaacaagatactaaacatgaattagatgttgcgcctatgttcaaatcattgattggaaaagaaatttctgaagaggatgcaaattatgcatctggtcttacagctgtatgttcgattataaatggcggcaaacaatttaactctgtaccagatgaagcttcacttgaatttaacgtaagaccagttcctgagtatgataacgactttatagaatcgtttttccaaaatatcattaatgatgtggatagcaataagctttcactcgatattccaagcaatcaccgacctgtaacaagcgataaaaatagcaaattaattactacgattaaagatgtagcttctagttatgtagaacaagacgaaatatttgtttcagcgcttgtaggtgcaacagatgcctctagtttcttaggagataataaggacaatgttgatttagccatttttggaccaggtaatccattaatggcacatcaaatcgatgaatatattgaaaaagatatgtatctgaaatatattgatatttttaaagaggcttccattcaatatttaaaagaaaaataagaacgatgctgtcagctgccctattcgcgtgctggcagttttttattgcgaattttaagttgatagaaatagcgatgaatattgtttgaatgtaaatattcaaatatcaacaagcacattttcattgattaagtgatgtaaaactgaaattattgtgctgatttgtcatacatatattgactaatggtcatataaaaagatagcttctaatagttacataaaactcgtaaaaaccttctcgtaaaaggaatgggacataaatccctagaaaacagcagctcaacgagctgtaaattatcaaatacatttgaaaaaagctgatttctatcaaataatttatagaaatcagcttttttacattgtctaagaacttaatgtctctgtctctttggaactttatatttcataagtactattttattgtttaaccttttttttaaataaggtataaatctacaatatccaaataagccccatcgattcttataatagtcaaaataattatattcatgtattactcttattgtatttggtaaaatttcattcaatttttttaaatcattgtaaccatatttaaaaacaggttgtgaggataactttgataccgattgatgtctctttgtattattcgcaattgtttttgagcaaaattcaatcgcaaatgtcaaattatgatctcccatctttttgataatagtgtccaataattgagtcattacactctcatcaaaatacatcaatacaccttcaataataaacaatatatctgacttactattaaaaaatttataatttttgacatcatcaatccaactgtaatctagcatagatttagatatcatcttataactattactttctttaaaaaatgtttttcgtatttctattgattctggtacatctaaatctatccatgatattttttctttattaaatctttgaaaccttgtatctaagccacaacctatattgaccacgattaaatctttattatccttgataagcctcttagtaacacaatctattatcacagtacgtatactaattccaatttgagacatgtcatcacatgtaacatttttgtacatatcatctaaaccatcaaatattttttttgatagtgcgtcttttattattgttttttcgttttcgtactcttttgctcgagctatcaaaggaattaacattgattcgggaattccaaccagttgcttcatttaatcactccttaaaaacattagtaccaatgcataagaaaatttttacaacttatttctattattttttatttaaaatttctttttttaatttacttctcaaatgttctaatgtaataggatctgtgaaccaataatcttctgctttatatgaaattacatgtcctttttttacagcttcaatattctgccatgtatgtgttttttcaaaatcaaattttccgtacgaaggtttacttaaaaatatataatcaccagcatatttactaatattttcttttgaaatggaagcatagccttttttatcttcttgtaatttatctttatattgctttgtcattggcataccgaatgcatcatgaacaatatccaaaccacgaccccatgtagagttatatatgtatatttgcttttcatctggttcaaacacagatgctgttgcttgaccaattttactttgaatttcttttttatcttttctagttttatcgtcccactcttcaatccattttttagctttatcttcattattagtcaacttgcctatttcttttaatatttctttatgattgtatttattgtatgtatatgggattgttggcgctattttttggtatttttttatatttttatccatagcatctacaacaattaaatctggttttgctttagcaactctttcaacatcattttctccaatataatcaaccccttttaaataaggttttaaaattgaagaatctttagttatatctgaaacagcaattggtttgattcctaactttataaaatcaccaacataaaatccagttaatacagcaactcttttaggtttctctggtactttcagtgtttcaccattttcaattttatagtctgtagtctttgtcgagttacttgttttatcgacagatgctgaacacgcagtcaaaataaataaattacataataaaattccaattaatcttttcataatatcatccttttgtttttcaattgatattcattttcaattataaaatattaaaagaattagtcaacgcctgttagtaatacacatcagtaacatttctattttcatttatgatattatctaattattaatttataatataaaggagtatgaaattaaaatgaacaaagtccacaaacctttatatttttatttaatgcttttcttctctacaactatcataggtgcacttttattgtatttaccttttactggtaaaaagccaatatcttttttagatgccctatttatagcttcaagtgcatttacagttactggcttgtccccagttgatataggatcacagtttaatatacttggtgagatagtaatactattattaattcaaataggtggtctgggtatcgtgaccgtaaccctattgacactagtatttttaaatagaaagatatcaatgaaaaatagattcttgattatggttacatggaatattgacgaacctggtggtgttattaagctaattaaacacttggctatttatagtttagtcactgaattaattggtatgatttgtttgtgtttatcttttataccaaaatttggtataggcaaaggtttatttttaagcttattcacatcagtatcagcttttaataatgctggatttgccctttttaagaataacttaatagattattctagtgatccaattgtcattattacaatctcaatactcataatatttggaggtattggacattttgtcgtgatagactttattaattgtaaaaaattgagtaaattatctttacattctaaattagtcttaactacaactagtatcctaataattataggagctattacattctttttattagaacagtttaatactatgcaacatatgggactagttgaaaaaatcggaaattcttttttccaatcagtaacaacacgaacagcgggttttaacagtatagatatagcaagcattaacaaatctaccgcattaatgttaatgctacttatgtttattggtggtgcccctctcagtgcagctggaggaattaaaataactacttttgcagttgcgtttatttttgtactaaattatatacgtaaagaaaataatgtttcagtattcaataaagaaatatctgacaaacatataaaactatctattgttaccattaatatctcatttctatttatcagcatcattacttttatattatcgataattaatccgaacatatcattaatcaagttattattcgaagtggtttctgcattcggaacagtagggttaagtatgaaccttaccacagaatatcatggtattactaaaataattattatattcgttatgctttgcggtaaagtaggactattaactttattaagaacatttataccaccaaaaagtcctaaaaattaccgctacactaaaggacaaatttatctataaaataactatccatctttaataagaaatgaactagtgttttaatctattacattaaaaaaactacctaaacaggtagttttttatttattttaggccgattaaatgtcttatgtctttaattaagtaaaatgcacaagtacacctttaaaaagatttactcaaaactaaactatacctagttaaccgcttgtgattaagaaattttaaatgtggtttcttttaattatgtcaaccacccataaggattttaatcaagcactcattcattcctgcactcgcaatatgcattacttatagaagtggatgcactctcatattatggcaataccataactcccgcaccataatgatttaaataccattatgaatctcaattacaaattagcacataaaaaagacgcctcccataagtctagtcaccaaatggaaaacgtctcgtaattaaaatatatttgcgtgcattctaatttgtacttagaatacatcatactcgttcataatgtaattttctaattagtcaaaactatatacagttttacatcattcccggcattatgcactaataaaaacttactttaatacacgctttaaagattattaaatcagcgttttaatttttagacaacgctattatttttagtttttcaattctattatgtcataattatgtcactcaaaaactgttttccaacattgatttattgttggaaaatctcgaaaatctagtctatttctccaacaatcgaagaattatgcccttttttctccctttaaataagtcataatacgaggcatacatgcaacatttacaataaaatatgttcctacatcgtattatacgaatgctcacacttatagttgtttagtaaacccagatgtattgctaacatacccattatcactatatagtttatgtgcagatagtctttcatttctattaccactatttagtgttattgctttacaattcaaccgtttagaaaattcttcagaatcagctaataatctctttccataaccttttttcctaaattcagaatgtataacaaacgcaaggattctcatatactctgcatttttttcgtaaaacatcattttacacataccacttaaaccaattattttattttcttttatcaaaagcagtaggaagtaatcatcatgattcgttattttctttagtctcttttttaaatcattctcatttgttggataacctagatcatcatataatttacatagttgatttaatttttcaaaatcactgttattaaacaatcttgtaattatgctcatataacccaccctaaaaatattatgtacctattgttacatacaatagatacgcaaaatcatttctcactgcaaatcaggacgtttctcagcgtaaacaaatcatttctattcttttgaaaaatatctgcatatcttcacagtaattttataacagattaataaaattaaaaaaacataacaacaagtattataataaatattataatagctatcgtattaaatagtttagaatatgcaaactgaaaaataaaaatcacaattaaaatactaagtaatgtaaatggtaatagcatcatcagatctttaacattatttctttgttcttgctcccaatcgctaatagccctaaaactactttttttatctataggcgatgtaaaaataccatatattgaaggtgctatacctcctaaaatagcagttcccaaagttgtcattactgaaattactgcgaaagtatcatccgaaagcaataaattcaaactaatgcattgtttattacccatcgaatttattgaccaaatagctagagaaataaacaacccaaaatttaaaataaatgatatagtaatagcaattgtttacaaaacacgaaatttttcatttttatttatattatccatttttctccctttttcttaaatcattttattatatattacaataatcaatctgaaatgttgatgtaatttgaaaaaaatatcatacttttactcctgaaaacctccctaaatcatcaatatgaaaatcagtattaggatattgcgtttacaactcttttaaatctcactcattcttctcatcgtcttaaccgatactatcaataaatactggcaacaccataaaatatatacccaatttataaaaacctaattgactcataatcttctaacggtatatcatccacaatcacagtatgattaggattatcgttagatacatctttcactgccttatctaacccctcatcacctccgtcccattcaccaatattaatgaatataggtacattaccgtttatatcatgcttatctgtaaataatttatgatatttacccaacatatcacgagcttttaaacgatcactaggttttattggtacctctatcagttcaacatgttcattatagactaattgtactttgccactttgtggattttctttatattctccacgcttgactacaacttctttcgtttctgtttcatcaccgactgccgcattcgttagcacatgtaataactcttttgcggttaatacattctcatctataatcttatctttttgttcttgtatatattgcttgatgtgcggctttttcaataacctacacgctgtcacatgtgcgctatttgcgttatatcctgcttttatggcactttgtgttacattcagtgttctaatatactcattcacaaaacgtgcttgctttgcagttaactcactcattttatcacccccacaattttatctaatatggtttcataccataatattacagattgttctgaacaatctaaggcactactaatatcttgataactaagtccttgtataagggagtcaaaaatataaaactctttatcggtcgctaatctgtcaacaatcatttctatgtgattctttataatatgatcattgacattatcgtctgtcatcaattcgtcagaatcttcatcacctattaaaaagaaatcatcagtatttatttcatcatcgccccgttaactagctttgaagtctttagcacacttgcatataccggctgtcgtgctggcgagatactagcattgaagtggtctgatattgattttgaaaacaacacgattagtattactaaaacatattacaatccaaataataacaagaagaaatatcagatacttccccctaaaactgaaagttctatcggtaagatttccgttgacccaaatgtaataaaggtgttgcgtgattataagataaacgttcaaaataattggaaaaacgaattatataatgataaccattgtaatgaaaaaactatcaatgtggatacaaaccattatgtcacgtaccagcatactcaaaaatatctctacgcactcattcagatacacacattgcgcattgctcatagaatcaggtgtacacattaaagaaatacaagaacgattacggcataaagatatcaataccactatgaatatctatgctaaaatcacaaattcatacaaaaaagacgcctcccataagtttagtcaccaaatggaagacgtctcgtaattaaaatatatttgcgtgcattctaatttatacttagaatgaatcatactcgtgcataatgtaattttctagttagtcaaaactataaacagttttacatcattcctggcatgccacccatgttaggttggtcattatttttttctggaattgatgctacaaccgcttcagtcgttaagaacattgctgcaacacttgcagcatgttgtaatgctgagcgtgttactttagttggatcaacgataccttcttctaacatattaacccactcgtttgtagcagcgttaaaaccaacacccggctctgcgtttttcaaacgttctacaataacagaaccttctaatcctgcattttcagcaatttgacgaactggtgcagttaatgctttaagtacaatatttacacctgtttcaatgtcaccttcagcttcaatttcacttactttttggtaaacatttactaatgcagtaccaccacctgcaacaataccttcttcaactgctgcacgtgtagaatttaatgcatcttcaatacgtaatttacgttctttaagctctgtttcacttgctgcacctactttgataactgcaacaccacctgctaatttagctaagcgctcttgtaatttttcacgatcaaagtcagattcagtttcttcaatttgagatttcaattggctaacacgtgcatcaatgctgttttcgtcaccgtcaccatcaacaacagtggtattatctttagttacttctactttacttgcagtacctaacatatcaattgatgcatcttttaaatctaagcctaaatcatcagtaatcacttgcgcaccagttaaaatagctaaatcttcaagcatcgcttttctacgatcaccaaaaccaggtgcttttactgcaacagctgtaaatgtgccacgcatacggtttagcacgatatttgttaatgcatcgccttcaacttcatcagctacaattaagattggacgattagattgaaccacttgttctaataaaggtaagatatcttggaaagacgagattttcttatctgttactaaaatgtatgggcgttctaattcagcaaccattttatctgaatcagtaaccatatacggtgattgataaccacgatcaaattgcataccttcaaccacttctagttcagtgtttagtccatttgattcttcaattgtaatgacaccatcgttacctactttttccatagcttcagaaatataacgtccaatttcttcatctgctgctgaaatcgcacctacttgcgcaatttcatttttattttcaactttttgagaattttcatgtaacgcttcaacagcaactttaactgctttgtcgataccttgtcgtaaaccaactgggttcgcaccacttgtaacatttttcaagccttcttgaatcattgcttgagctaatactgttgcagttgtcgtaccgtcaccagcaatttcatttgtcttatttgcgacttcttgaactagtttagcccccatattttcatatggatcttctaattcgatttctttagcaatcgtcacaccatcattcgtaattaaaggtgctgtaaactctttatctaatacaacattacgtcctttaggaccaatcgttactttaactgcatttgcaagttggtcaacaccacgtaacattgcttgacgtgcatcttcagagaatttcaattgtttaaccataaatgataaacctccatttgtttagttgtgtttcattttcgttctatttaatttatttatgaattaagttctgtattattcaataactgctaaaatatcttcttcatttaataccagatatgtttcattatctcgtttaacttctgtaccagcatattgttggaacacgacacggtccccttctttcacttcaggagtcactcttgtaccatcatttaataggcgtccagttcctactgcaacgataacgccttcgtttgatttttctttagcactatcagttaaaacaataccacttttagttgtttgttcttgttcttttttctcaataatcacacgatttccaattggttttagcatgattgttcctccttaaaaaacctaaagtttagcacttaacattaaagagtgctaacatacatttataataatcaaatttggtcaaaatttcaagtcataaccttttaattaagttttgtaacttcaagttatttacgataaaataaattataaacaaatatttggaggaaaattatgacaagattatgggcatcattgctaactgttattatttatatattgtctcaatttttaccgcttctcattgtaaaaaaattaccatttgtacaatatagtggcatagaactgactaaagcagtcatttacatacaacttgttctatttttaatcgccgccacgacgattattttaattaatttaaaaattaaaaatccaacaaaattagaattagaagttaaagaacctaaaaaatatatcattccatgggcattgcttggatttgcattggtaatgatttatcaaatggtagtgagcattgtattaacgcaaatttatggtggacaacaagtaagtcctaatacagaaaagataattattattgctcgaaaaatacctatatttatcttctttgtatctattattggtcctttattagaagaatatgtattcagaaaagtaatctttggagaattatttaatgcgattaaaggtaatcgtatcgtggcatttattattgctacaacagtaagttcattaatatttgcattagcacataatgatttcaaatttattccagtttattttggtatgggtgtcattttttcattagcatatgtttggacaaaacggcttgctgttccaattattatccatatgttacaaaacggatttgtcgttatattccaattacttaatcctgaggctttgaaaaaagccacggaacaagcgaattttatatatcacatttttattccataataaaaaaaacgaatcacacacggattatcgtcgctgtgattcgtttttatttttctttttatttcgctttacaaataagaatagcatgattgaaaataccaccatcatagaacatacaattgctagccaacttttactatatgcagttgacgcacttttcttattatcttcttgttttttaactactgtaaaatcgtctttttcatgcggttcaaatgagcgttgttttgaatccggcttatcttcgggctttttcaaatctggcattgatccaatttcaccagtaattaatgcgagtacttgttcatctaaattacgatagtacctttctgatttcaatggattgaaatattggaatctaaagtaattcgattgctgttgtaatccatttaaatatgcatttccgctgaaattttgttttcgaataatattataaatgtcttcatcagtaacttctccataatctttgcccaacttattaatttgatttaaaatatacggattatacttgtaagccccatttgccaaggctaaaaatcgttgggatacaaaatcattaccagtaggattttgtgagtttccttgattcccatttggttgccattgaccttgattagatccatctgaagcatttgggttccatgtccccccatttttcgagccaccagaatgattggaatccccaggttgatcgggatctggtgacgggttaggatttggcttattagggtctggttttggattcggatttggctttggtttatctggatctggttttggatccggatttggctttggtttatctgggtctggttttggatctggatttggtttcgggttatctggatctggttttggatccggatttggctttggtttatctgggtctggttttggatccggttttggtttcgggttatctggatctggtttaggattcggacttgggttttggttatttgggtctggttttgaatctgtacttgggttttggttgtttgagtctggcttcacattattcgaatcaggattagcatcacgactattcgaacctgttccttcattacccgtttgatttgattcgtgagctgtcccagtctcattattattcatttcactatttactgatggtgaagttatattatgattcaaattagtagttggtttttctccatttaagttatcctttgcttcaactgtgtgcgttgcaagccctaaactactactacttaaaattaaaatacttgttgaaagtaacattttcttaaaccaatgatatgacatttcacgagacacctccctttttcatgtaagtattaatctaagtataataaatatgcgttgaaaatgcatttatatttggaatttgaaaatgaatattaatattcttgaaattttcgtaaatattgctttacaagtacgagtataaattttatacttagtctattaagtattctttactaaagaaggagcaataattatgggcttatttaaaaaagataaaaaagcaatgacttttgacaatgcaatggaagaaagacgttcaatatataatttgaaagattcgatatcaattagcgatgacgaattagaatcaatgattgcacatgcagttaaacatgttccttcatcatttaattctcaatcaactagaattgttctcttgttaaatgacaacaataataaattttgggataacacaaaagcaattttaaaagaagtcatgggagagaatcgtgatttcgagccaactgaacaaaaaattgataacttcaaacattcatacggtacaattttgttttatgaagatcaagatgttgtaagtggtttacaagaacaaatgccaaactactatgataattttgcaatatggtcaactcaaacaaatgccatgcatcaatttgcaatttggactgcattagctactaaaggcataggtgcttcattacaacactataatccacttgttgatgagatgacttcaaatgaatttaatattcctaaaagttggaaacttattgctcaaatgccatttggtgatattcgtgaagctgctggcgaaaaaacatttaatccagtggaagatcgtttcgtaataaaaaaataatcaatatattgttaggaatgggacagaaatgataaagaatcattagttattcattatgtagtagttcttacacattagccgctgctaatgtgcacttaagaataggaatacatgagtaaaactcatgtataagaaatactaatttctaaagaaaaagtatttctttatgttagagcccaccccaacttgcattgtctgtagaaattggtgttccaatttctctatgttggggccccatcaactactgtcaatataactttgtagagcctaggactttgattttatgtcttgtgctcgttttttgcgtttcaacataacttttagtaagttatatataagatctatcaaggatgtgatgttatgaaagtccaaatttatcaattaccgattgtttttggagatagttctaaaaatgaaactcaaataacgcaatggttcgaaaaaaatatgaatgctgaagtagatgtagtcgttttacctgaaatgtggaataatggctatgatttagagcatttaaatgaaaaagcagataataatctaggacaaagtttttcatttattaaacatttagctgaaaaatataaagtcgatatcgtagctgggtcagtttctaacattagaaacaatcaaatatttaatacagcttttagtgtgaataaaagtggccagctgattaatgaatacgacaaagttcatttagttcctatgttaagagagcatgaatttttaaccgctggcgaatacgtagctgaaccctttcaattgtctgacggtacttatgtgacccaacttatctgttatgatttacgttttccagaattattaagatatcctgctcgtagtggtgctaaaattgcattttatgtggcgcaatggcctatgtcacgtcttcaacattggcattcattactaaaggcacgtgcaattgaaaataatatgtttgtcattggaactaatagcactggattcgatggtaacacagaatatgctggtcattcgatagttataaacccaaatggagatttagttggagaattaaatgaatccgcagatattttgactgtagatttaaacttaaatgaagtagaacagcaacgcgaaaatatacctgtatttaaaagtattaaattagatttgtataaataagaagcgcccgaaataatatttaacacatgtcatgactaaacatagatttatgagagatttttcataagtctatgtttatttttttataatagataactcagtaagaacccatttcgccctttgcaaatgaatgattttcttaattaaattgattaattttttgaccttttccaacattagacttattcatatattttaacggcgggtctcataatgatgattaactcatcccttcttcattacaaaaaaggccgcgagcttgggaggggctcacgaccatacttattattaagggaatgttttacagttattttttcaatctatttttggggatgttattaattatgaaaaaaattttatttatcaaataatgataaatcgatgttgtttacgatagcttacatgctagaaataattatctgtaatgataattaagaaaaatacatagcactgagtccaaggaaactaactctactagcaaatgttactcacttgctaattttacatggttattaagttgggatggcttaataactcatacttttagtactatacgaagataacaaatttacaatgaaagtaattaattattcatcttattttttagtgaatttgttcactgtgtcgataatccattttactaagtcaccgattgttgaaatgatatcttgtgccattgaaatcactccttccttaattaagataaaaattcttaaaattaaacaactcatcaactattttccatcacatctctgtgatctagttatattaaaacatgctaaaagcatttattttccaatttttcttaactagtcgttttttattcttaactgtaaatttttttatgttaaaatattaaatacaaattacatttaacagttaagtatttatttcctacagttaggcaatataatgataagagattgtactaaatcgtataatgacagtgaggagagtggtgtaaaattgaattattttgataataaaattgaccagtttgccacgtatcttcaaaagagaaataacttagatcatattcaatttttgcaagtacgattagggatgcaggtcttagctaaaaatataggtaaattaattgttatgtatactattgcctatattttaaacatttttctgtttacgttaattacgaatttaacattttatttaataagaagacatgcacatggtgcacatgcaccttcttctttttggtgttatgtagaaagtattatactatttatacttttacctttagtaatagtaaattttcatattaactttttaattatgattattttaacagttatttctttaggtgtaatctcagtatatgctcctgcagcaactaaaaagaagcccattcctgtgcgacttattaaacgaaaaaaatattatgcgattattgttagtttaacccttttcattatcacacttatcatcaaagagccatttgcccaattcattcaattaggcatcataatagaagctattacattattacctattttctttattaaggaggacttaaaatgaatacattatttaacttattttttgattttattactgggattttaaaaaacattggtaacatcgcagcttatagtacttgtgacttcataatggatgaagttgaagtaccaaaagaattaacacaattacacgaataatttaaatagagagtgtgatagtaggtggaattattaaatagttataattttgttttattcgtattaactcaaatgatattaatgtttacaataccagctataattagtggtattaagtacagtaaacttgattattttttcatcatagtaatttcgacattatcgttatttctatttaaaatgtttgatagcgcgtccttaatcatattaacttcatttattattataatgtattttgtcaaaatcaaatggtattctattttgttgattatgacttcgcagattattctatactgtgctaactacatgtatatagttatatatgcatatatcaccaaaatttctgatagtatatttgtaatattccctagcttttttgtagtttatgtgactattagtatactattctcatatataataaatagagttctcaaaaaaattagcacaccatatctaatactaaacaaaggatttttaatagttatttcgactatcttactgcttactttttcattatttttcttttattcacaaataaactcggatgaagctaaagtaataaggcagtattcttttatttttattggtatcactatatttttaagtatattaacatttgttatttctcaatttctccttaaagagatgaaatataaacgtaatcaagaagaaattgaaacctattatgaatatacattgaagattgaagctatcaacaacgaaatgcgcaagttccgtcatgattatgtcaatatcttaacgacactttcagaatacattcgagaagatgacatgcctggcctacgtgattatttcaataaaaatattgtacctatgaaagacaatttacaaatgaatgctataaaattaaatggtatcgagaatcttaaagtacgtgaaattaaaggcttaattactgcgaaaattttacgtgcacaagaaatgaatattccgattagtatcgaaatacccgatgaagtaagtagcattaacttgaatatgatcgatttaagtcgcagtattggtattattcttgataatgcaattgaggcatcaactgaaattgatgaccctatcattcgcgttgcatttattgaaagtgaaaattcagtaacgtttattgttatgaataaatgcgctgatgatataccacgcattcatgaattgttccaagaaagtttttctactaaaggtgaaggtcgtggtttaggtctatcaactttaaaagaaattgctgataatgcagacaatgtcttattagatacaattatcgaaaatggtttctttattcaaaaagttgaaattattaacaactagccataaggatgtgaatgtatgaaaattttcatttgcgaagacgatccaaaacaaagagaaaacatggttaccattattaaaaattatataatgatagaagaaaagcctatggaaattgccctcgcaactgataatccttatgaggtgcttgagcaagctaaaaatatgaatgacataggctgttactttttagatattcaactttcaactgatattaatggtatcaaattaggcagtgaaattcgtaagcatgacccagttggtaacattattttcgttacgagtcacagtgaacttacctatttaacatttgtctacaaagttgcagcgatggattttatttttaaagatgatccagctgaattaagaactcgaattatagactgtttagaaactgcacatacacgcttacaattgttgtctaaagataatagcgttgaaacgattgaattaaaacgtggcagtaattcagtgtatgttcaatatgatgatattatgttttttgaatcatcaacaaaatctcacagactcattgcccatttagataaccgtcaaattgaattttatggtaatttaaaagaactgagtcaattagatgatcgtttctttagatgtcataatagctttgtcgtcaatcgccataatattgaatctatagattcgaaagagcgaattgtctattttaaaaataaagaacactgctatgcatcggtgagaaacgttaaaaaaatataataagataataaagtcagttaacggcgtattcaattgtaaatcttgttggattttaacaagataactagcaaatgcactgtatagctggctttttaattttattaacaaaattaaatatgacgcgtgaattaaaaaatgatgtaacgtctctttgtatacctattcctattactacataatttatcaatttctatttcactctacaatcctatggcgcaatttttaacaaaatatactaaatttgaaattgacagtttccataaataaaatgctataatttcctactccgtgaatcttattttgttttaaaaaacagtgtagcacaagattcaacttgtttcctacactgttttataaatgaattatttaaaatgcttgttcaacctcttgtaatgttggcaaactattaatagcaccatacttcgttgtcactattgcagcaacgcgattgctaaacgctaaaatttcctcaccttcattttcaaataactgagttaaatttaacacatcggttgctaaaatcctgctaataactgcaccaataaatgcatcccctgccccagttgtatcaacaggttttaccttatagccactatgataatgattaataccatttttcaaatatacggcagcaccatctgctcccttcgtataaatgactacagtaacattacctgtaaataatgattgaatggcttcattttcatcatgaatacctgtaataaattctaattcttcatctgaaacttttacaatatgcgccaatggcaaaaaggtatgaatagtttgtcttaaatcttcagcgttatcccataatggcaatcttacattaggatcaaatacgacagtaccatttgcatttaatgttttggtaatcaattgataatgtgcatctctcatcggactatcgaccaaatcaacagaacaaaaatgtactacatcattttcattcacatcaatatcattcacaaaacttggttcaaataacatatcagcagagggcttacgataaaaagaaaaatctcgctcgcccgcttcagtcaaactcacaaaagctaacgcagtgtttgcttcattcgtgcgatacacttttgatacatctacaccaatacttgatatcgtttcaataatgctatctccaaatgcatcattacctaattgtgtaatcatatacgcttgttgtcctaacttttgaactgtacaagctacattgcatggcgcgccaccaatttgcttcgtaaatgtttgaacatcttttaaattcgcatttgtaacatttggaataaaatcaattaacgcttctcctattgaaaatagacgtctcatttatgttcatcctttaaatcatatttagtaaattgtaaatatacttgccctgattctgttgatgttttaatacctagtgcgtcttctgtcgggaaaattcgagatgtcaaaacacgttctccatcattacagaaaatttctatactagatgtatcaacaaaaatttgtaattgctttaatggcgtgtctaatatcgtactacgcgtcgtaccttcaacatttgtcggcaataaaccactgtcgctgcgatctaatgttattttattttcacgcttgttataagcaattaatgttgaagaagtcttagatgtacgtaattcaaagtacacttcggtagcatcattatccaaaatatctatgattaattcatactgtttaccttcatacggatgtaattttcgagtaaatttatttgcgtagcctaatgctgtctctttattgtgacgtaatttttccaacgctggatatggacgttgcttaagttgaccattttctacatttaatacacgaggaattgttaagcaatgggcccatccttcattatcagtaggatattcgatttccggtaaccccatccatccaattagtactcgtcggcctttttcatctaaaaatgtttgaggtgcatagaaatcaaaaccattatcaagctcgacaaaattttcatgttcatatgttaacttttcaatatcaaactttccaagtatataaccactttgataaatatttttgaactgatcgccttttggttcaataccttgtggacaaataagtatgacatcttgattatctacattaaagtaatctgggcattcccacatatatccaaaatcatccaactctgtatttatttcacctaaataatgccaattaattatatcttcagtattataaagtaataatcgaccttgctgatcattattttgtgcaccaatgattgcataatatttctcatcatatttaaaaactttaggatctctaaaatgactcgtatatccttctggttgttggctaattactggctttggaaacttttcaactgaaccgtcttctttcaatcgtgcgatcatctgactcgcatgtcgttgccaatgattatctcgatgatttcctgtgtacatataatataaatgcccgttatattcaaaagcgctaccgctatatacaccatggctgtcatatttagtatctggatttaaaattggcccttcagctttaaagtttattaagtcatcactcgtgtagttataccaatactttaagccatgtactgcgcctaatgggaaccattgatgtgaaacataatacttccctttataaaaaataagtccgttggggtcatttaataagcctgtttctggttgtatatgaaattgttgacgaaattttgattgatcaacttgttgttttaatgttttaaaatactcagtatcaacgtcctcgattcgttgataacgttcttctctagtccattcggtcataatatttacccagtcctccttttataatttatgctgttaacaatttatattctattatagcaaattttacctacgttctttaacttttaacctatccatttatagttatatggtatcggttccacatttattttaaaaaatacagcgtctaaatattaacatctactgtgacgctatatggcatatcttgctttttaagcatctgttgtatctcttccatcgcgcattggccagcttcaaaataattataatgaattgtttttatcgatggagacactaattgtgtcattgggtcaccaccaaaaccatatatttgatgtggtttcataacatcttttttatcagaataatatttataggcagctaatgcaatcgtatcagttgctccaacaaccgcatctacttgctccacattttccaaaacatttgcaacatctttttgtgcttccacataagtaaaatttgtttcatgtatattaggtttaatttggtatttagctaactggtcaagtaaaccacgttttctatgtataccaactgcaatatctttttcacttacactaaacacttcaacttgttgatatccctgttgaccaatccattcgcctataatttgacctgctttataatcatcatgcacaatactatgaagttgttcatgttgttgaccaacaataacgattggtacattcattttattaatgacttcaatatgtctctctgttatgtctgtagccattaaaacaataccatctactttactgcgtgctaatgtttcaagcgcttgtatttctgcttcgatatttaaacctgtgtaatttaaaattaattgtgattcatatttttggcattgttttgccaatcctttgattgtttcatctactgcatatgaattcattctaggtataatggcaccaataaggtgtgtttgtctcgctcttaaactttgagcaaattgattcggttgatagtcatgttctgctataattcttgttaatttttcacttgtttttttactgacagatccattatttaaaaatctagatactgtactttttgaaacgcctgccaatttggcaatatcagatatatttttcatacttattcacctatcattatttgtgacacttagccttattttagcatatgtgtaaccgctttaaataatatttctgcttctttcataaaaagatttcaaaataaaacttttgtataacaaaatgtcccaacatcaacctttagttaaatgtcaggacaatgaatattctatgtaaatatattctaatatcgaatatgtttattgaatctatttagctcaccttcaaagtaagcatgttcaccgtgaacaatcttgtctaatcctatattcgtttcttgttccgtaacagataatggtgtaattaatttaattactttcgcaataataaacgtcatgactatactaaaaattacaactgctgttacgcataatatttgtacaagtataatatgtatgtcaccagtataaataaagccattctcaatgtcaggattggcttttttactttggaaaactgctgttaaaacagcaccaataataccaccaacaccatgaataccaaatgcatctaatgcatcatgatattttagttttaccttgatgtaattaatgacaatataacaacagatacctcctattaaagccattattgttgcactaagatatgttacatatcctgctgcaggagtaatgacaactaatcctgctaatgcaccgagtaaaagtccaagtaaacttgtcgtctttttaaaaatatattctaaaattaaccaacctatagcacctgcactggctgaaatgacagtatttgtaaatgcaagcatcgcaatattatcaaatgtaaaagcactacctacattaaatccataccaaccaatccacacgaatataccgccaatcaacgtaatgataagattatgtggtgttgattcagaatgtttgtttccttttccaatcataatagctaatactaaaccagaaacacctgatgtaatatgaacaaccgtacctccagcgaaatctaatacaccgagtttgttaatccaaccgccgccccaaacccaatgtgctactggactgtatacaagagcagtccatattactacgaataataaataaggaataaacttcattttctcagcgattgaaccagataaaatagaaattgcaatcgtacaaaacatcatttgaaataacataaacaaagcgaaaggaatatgtgggctaatatcttcttgagtcgcaaaacctacatgattaagaaaagtatattcccaatttccgaaccataaattcccattcccaaaactaattgtaaaaccaactgttatccatacaaatgtaacaagcacaattgctgccatactttgcatgacagtattaagcgcatttttagattgaactaacccaccataaaataaacttaatcctggtgtcattaaccaaactaataatgtacacaaaaacataaatatcgtatcgttaagattcatacttaccactcccttttttcataataatctgacaatttataaaaagcaaaaatgcgttaagttttattacatcttttggaataaaatgtgccacactatataaaagtgatttcatgaactaaaacaaaaaagactacttactcacttttaaattagcggaagtagccatagaatctaatatctattttattgttaaaatgataacgttaaactttttgaattgtaattgtccatgaagcattatcaatttgttcatagtttgttacaggataaccattttctgcagcccaatttggaatggcttccgtcgcttgcgtgcaatcaaaatcaatttttaattcatctccagattgcaatgttgccattttcttttgcgcttcaattaacggaaatggacataccattcctactgtacctaattcgtgtatcataattatttctccttttccaatcacttttatttgatcaacatcatttgcataataatcttctatactatttgcgtttgctgtttaacctttgcagattgttggtgtacttttttcattggacgaacaaagataaaatgactcattgtccatacaccaactatcatcgatgctagcgcaatccatccttgccaagtcatcgttgccgtttcaaccaaaccgttaccgatagaacaaccaccagcaactgacgcaccaaatcccatacatatgccaccaatggcactgtttcgtattgtaatcttgtctggcaatcgccatttaaattctcttgatcctctagctgcaatatatgaaccaatgaaaattcctagaactaaaaagacaccccaatcaataaatttagtttcacctgtaatcaaaaagtgtactaaatttgctgaaggcgttgttatacctaaaccgtcatttcttccagttgatgcactcattggccaagctaagagtgcgataagtccaattacaattgctgcaataaatggatggtatcgtttttcgaaaaggtaatatctaatacctgtataacgttgctttagttttggaacagcaactcgaactttcttattattgagtgttcttacaactagaaaaatggtgattatagttaatataacgactaatccccaaaacggaatgccagttgtttgagacatatcactatttacattcgttggttgattaattttatccattactggctttaaaatccctgttttagtgattgctgcagtaacagcatataatactaatgcaatccaactaccaattagcccttcaccagcgcgataccaagtacctgttgcacatcctccagccaatactattccaattccaaaaataaaagaacctataattgttcccaatattggaaaactatgtgcaggaatttgtaaaatatctgttgccgtcaaaatcaataatcctatactttgaatagtaatagcgattaataatgcatagaacatcttattattcttttgcacatacatatctcgaaagccacctgttaaacaaaatcttgttctttgcatgacaaaacctaagagtcccccgacaattaagccactaaaaatcatccacataatcctaacctctcatttccgataagtttagtatgtattataggtgatgattttcttgttttcaaccttatacacaatatttttgatatttatattatattcatataaggaaggcgattaattacgattcatcattatatctctacgtgttaatttattaacctatactatatttatcaacacaacagtttttcctttcattttcaaacataacagaaaaagcctgagacatacttagtcccagactgttctataattaattaaagatataacaaggttaatcattcaaagctaacatcacatttattcactgtaatttttcataaagaataataatgactgtaattctatacctaagtcaatttgatgtacttgcacatctgaaggcgtattaattctaccaggagtgaagtttaaaatacctttcacaccagcttggacgagttcatctgcaactttctgtgcaactctttctggtgtagttagaatcacaacatctatttcttccttcttcaatgttgttattaattcatcgttatctttaacaataacgttccctattttctggccaataacatcttcttttacgtcaaacgcttctgtaatcgtcatatcgtcatgtattgaaaagttatatgtgagcaaagctttccctaggttcccaactccgacaattgcgattttgatcatgtcactctcgcttagttcagatttaaagaaatccaataaactatctatattatatccgtacccttttttacctaattcgccaaaatatgaaaagtcacgacgaattgttgccgagtcaatttgtaacgcatcgctaatcgcttttgaatttacacgatctatacctttagattttaatgaactgacaaatctataatataacggcaaacgttttaaagttgctcgaggaattttaacttggtcactcattcgctatttcctccttcgtgtttgaatgaattatatctatgtattcaaacgagttagagcgtaattgttagattattaaaaaacaaataattgattacaatgaatacctaaatattatacattattgaattttaaaaataaatatcttagtttcaagacggcgttttatactgtaaaatggttattaatgtaataattacgacttttttcataagttaataaaatttgagaaagacgaaaggtgaagatcgaatgatacttttacaactcaatcatatatcaaaatcgttcgatggtgaagatatatttactgatgttgattttgaagtaaaaactggtgaacgaattggtatcgtaggaagaaatggcgccggtaaatcaacattgatgaaaattatagctggcgtagaaaactatgattctggaaatgtgtcaaaaattaaaaacttaaaactaggttatttaactcaacaaatgactttaaattctaatgcaacagtttttgaagaaatgtcaaaaccatttgaacatattaaacgaatggaaagcttaatcaaagaagaaacagattggttatcaaaacatgcaaatgattacgatagtgatacatataaaacacatatgtcccgttatgaatctttatcgaatcaatttgaacaattagaaggatatcaatatgaaagtaaaattaaaacagtactttacgggttaaattttagtgaagaagatttcaataaacctatcaatgattttagcggtggccaaaaaacacgtttatctttagctcaaatgctattaaacgaacctgatttattacttttagatgaacctactaaccacttagatttagaaacgacaaagtggcttgaagattatctacgttattttaaaggtgcaatcgtcatcatcagccatgatcgttactttttagataaaatagttactcaaatttatgatgtggctttaggtgatgtcaaacgctatgttggtaattacgaggaatttatacagcaacgggatttatattatcaaaaacgaatgcaagaatatgaaagtcaacaagcagaaataaaacgattagaaacttttgttgagaaaaatattacccgtgcttcaacaagtggaatggcaaaaagtagacgtaagattttagaaaaaatggaacgcattgataaaccaatgttagatgccaaaagtgcaaatattcaatttggctttgaccggaatacaggtaatgacgtcatgcatgtaaaaaatttagaaatcggttatcaaactgcaattaccaaacctatgagtatagaggtctctaaaggcgatcatatagcaatcattgggccaaatggtattggaaaatcgaccttaattaaaactattgctaatcaacaaaaagcgcttaatggcgatattactttcggcgcaaatttacaaattggttattatgatcaaaagcaagcagaatttaaatctagtaaaacgattttagattatgtgtgggatcaatatccgttaatgaatgaaaaagatattcgagcagttcttggacgtttcttatttgtacaagacgatgttaaaaagataattaatgatttatctggtggtgaaaaagcacgtttactactagcactacttatgttgcaacgtgacaatgtacttattttagatgaacctaccaaccacctcgatatagattcaaaagaaatgttagagcaagcactccaacattttgaaggaacaatactatttgtttcccatgatcgttactttattaaccaattagcaaacaaggtatttgatttaacaattgatggcggaaagatgtatttaggagattatcaatattacattgaaaaagttgaggaagcggaagcgttgaaagcgcaccaagaagaacagtcagttaacgtacaagcacataaaaagtctatggaacaatcgtcgtatcataaccaaaaagaacaaagacgtgaacaacgcaaacttgaacgacaaatatccgagtgtgaaaatgaaatagaaactttagagactactatcttacaaatagacgagcaattaacccaaccagaagtgtataacaatccacaaaaagcaaacgaattagctatccaaaaacaagatagcgaacaaaaattagaacacgctatgtctaaatgggaagaattacaacaaaaactataaaaatatacataactctaactgtaaaatcgctatagttagagttatttttttacaaattttaattttttttattcacaataaaaacgctgatattatagctatccacagacttatcctagttacccacaagtaaattaacactaatcaatcatttattttctgttttcccacctgatatccacaataaatgacgttatcaacaccttttatccacaagttattcactctttgttgataagtacgcatgttctctattgacattgtttttatcaaaattcattgttaagacattttctttatgaaataataataatattgaagtatatttttattattattaaaaataaataaggggatacttatgagcacaaatcaaacatttttaatatttgttatagcaattattctacttacatctgtaataggaattgttggacgatacatgagtcgtcaacgtctattaaaatctatggaaacattatggcaaacgatttctccattagaagcttttatcagaccgaactcacatttcgactatgagtataagctctacaaggaaaaatttgaatcacattcattagttgatgataaaacttggtccgacttaaatatgaatgcaatctttcataagatgaattataatttaacagctattggtgaaatgaagctatatgcctgtttacgtggaatgctttcaattacgaacaaatcattacttagtttatttaatgataatgctgaatttagaaaaaacgtaacatatcatttagctttgattggtaaaactgtttatccaacatttccagaccaaatcacaccggtaaaacgtcaaaatatattgtttctatgcccgtttttaccagttatctcatttgcagttatatttattaattcacaagttggtattttattatttcttatgagttgcctatttaatatcattttatcagcaactttaaagcgtacatatgaggatgacttaaaatctatcttttatgcatccaatgttttaaaacaaggctatactatctcaaaaattaaacatgctccacaacctgaagtcaattttaagcaatttagaacagcacgtcatttaacgagtgttttagctgaagttaatgatgaagatatcggagctatggtaattaaactagttaaacttattttcatgcttgattatgttttatttcattcaattcaaaaaagctatacaacacatatgaatgagcttaaaaattgtttcgattacatagctgaattagataatcattatgcattagcaatgtatcgtagaacgctagaatgttatactgaaccacaaattgatgattcaaatgatggcatagtattctctgagttaacacatccactcatagcagatgcagtagccaatgatttctcactatcacaaaatatactgttaactgggtctaatgcttcgggtaaatcaacatttatgaaatccatagcaataaacattattcttgcatcggctatacaaacagttaccgcaagcaaatttgtatatcaacctggaattgtgttcacgtcaatggcaaatgccgatgatgtgttatcaggcgatagttattttatggctgaattaaaatctattaagcgtattgttgaaattccagataatcaaaaaatatactgctttatagatgaaatttttaaaggtaccaacacaactgaacgaattgccgcttcagaatcagtactatcatttttacatgaaaaatctaactttagagttattgcagcaacacatgatattgagttagctgaactcttaaaacaacgttatgaaaattaccatttcaatgaggtaatagaaaataataacatacattttgattacaaaattaagcctggcaaagcaaatacacgtaatgccatcgaattattaaaaatcacttcatttccagcaaaaatatatgaacgagcaaaagataatgtcccgaaaatttagcatttaactttaaacataaaaacgtcagctatcacatgacagaagactatgaacagtttcaataatgttcatagtaatcatgttaataactgacgtttattttattctgcagaatactcttctaaatctatattgctgtgcccatttaatgctaaatcagcaaatcgaccttgctgatacaaatagtggccggcaacgcctatcattgcagcattatctgtgcataatttaggacttgggatagttaattgaatgtcattgactttgcattgatccgctaaagattgacgtaatcctttattactcgccacgccaccagcaacaattaatcgctgaacaccatattctttacaagcttgaatagctttaaacgtgagcacctctacaacactgttttgaaagctcgttgctacgttagcttcaatgattggaatatttttttgtcgttgattgtgaagttgattgattacggcacttttcaacccactaaaactaaaatcataactatctttatccaaccaaacacgagggaatgaataagtatcttcaccttcagcagccaaccgatcaacttgtggaccacctggataatttaaaccaattgttcgtgccactttatcataagcctcacctactgcgtcatctcgtgtttcaccaatgacttcaaatgataaatgatccttcatataaactaattcagtatgtccacctgaaacaataagtgcaattagcgggaatgttaatggctcttctatgtgattagcatatatatgtcctgcaatatgatgaacaggaataagtggcttatcgtaagcaaatgccaatgctttggctgcattaacacctattagtaacgcaccaattagtccagggccttctgtaaccgctatggcatcaatatcttctattgatacatcggcatcccctagagcctcgtttattgttgctgttataccttcaacgtgatgtctacttgccacttcgggaacgacaccgccaaatcgtttatgactttcaatctgacttaaaactgtatttgataaaatatctctgccattttttataacactaacgcttgtttcatcacaacttgtttcaacagctagtattaatatatctttagtcatttaaattcacccacataaccattgcgtcctcaccttcaccataataatttttacgtttaccaccatattgaaatcctaaattttcatatacatgttgtgccactttattattaactcttacttctaaactcatcacatcacaagtgtgacttgcatagtttattccgtattttaaaagcatttgacctaaaccatagcctctataattatcatcgattgcaactgttgtaatttgagcttgatcgataacaatccataaacctaaataaccaataatttgttgttcaaattctaagacaaaatatttcgcaaagttattttgctctatttcatgataaaatgcgtcaattgtccaagaactgtcattgaaactccgacgctcaagatcaaagacttgtggcacatcttctttagtcatctctctaatgtttaattgttcttttgactgttgatccaatttcgttccgcctcagctaatttatggtatttaggagtaaatgtatgtacgtctgaaggtttatctagcaattgatacatgactgatgcatttggtagctgcgcaatcacttcaccttgtaattcatcttgtaattttacagtatctttcccaatataaataaatggttggtttaaatcttctaaaaaagctcgcaatgcctctatcgacatatattgatcttctaaaatagtcactaattgaccattttgccactggaatatgcctgtataaactgcttgtcgtcttgcatcaaacacaggaaccaataatttatcagtatgatcgattgttgctgccaatgcctttaatgatgaaacaccatataatttaacatctaacgcatacgctaatgttttagcaacagtaacaccgatacgtaagccagtatatgaaccaggaccttcagcaacaataatcgcatctaattgctgtttagctattttgctctgctcaaatagctgactaatcgcaggcattaattgcactgaatgattttgtttagaatccgtagttatttcagctaaaacttcatcgttttgcatcaatgctactgataatggttgattcgatgtatcaatgagcagcgaattcatggataattgcctccttaatttgttcataatgttctccttgcgcgaacaactcaatttgtcttgtattttcagatattgttgaaatgttaatagataaatgcgtcgctggaagtaaatcttttataaattgactccattcaataacagtaattgcctgatcttcgaaaaattcatcaaatcctaaatcttcatcagaatcttctaagcgataacaatccatatgatgcaattttaaatttttacccctatatgatttaatgatgttaaatgtcggggaattaatcgtacgtcttacaccaagagcttttcctataaattgcgttaacgttgttttacctgctcctaaatctccgttaagtaaaatcaaatcaccacttttcaattgctcaactaaaaatatagcaaattgattcatttcatctaaattatttatctttatcaatgttgattctcctatattatgcttttcattcataaaaatgattatccattgttcaatcgtatctaactttatatttaacctttatattgtaacaaatttcaacttaaatttcttatctttgaaacagattatctattcaaagttaattgtaagaaaatttaaaatatttgttgacatactaaagcagatatagtaaattaaatttatcaaatttttagacaattctaactattaaagtgatatataccattcacggaaggagtataataaaatgcttaatcaatatactgaacatcaaccgacaacttcaaatattattattttattatactctttaggactcgaacgttagtaaatatttactaaacgctttaagtcctatttctgtttgaatgggacttgtaaacgtcccaataatattgggacgtttttttatgttttatctttcaattacttatttttattactataaaacatgattaatcattaaaatttacgggggaatttactatgcgaagcgacatgatcaaaaaaggagatcaccaagcaccagcaagaagtcttttacatgccacgggcgcgctaaaaagtccaactgatatgaacaaaccatttgtagctatttgtaactcttatattgatattgttcctggacatgttcacttgagagagcttgcagatatagctaaagaagcaattagagaagccggtgccattccatttgaattcaatacaattggtgttgatgatggaatagctatgggacatatcggaatgcgatattctctaccatcacgtgaaattattgcagatgcagctgaaactgtaattaacgctcattggtttgacggcgtattttacattcctaattgtgacaagattacacccggtatgattttagcagccatgaggacaaacgtaccagctatcttttgctctggtggaccaatgaaagctggcttatctgcacatggaaaagcattaacactttcatcaatgtttgaagcagtcggcgcatttaaagaaggatcgatttctaaagaagaatttttagatatggaacaaaatgcctgccctacttgtggttcatgtgctgggatgtttactgcaaattcaatgaactgtttgatggaagttttaggtctaacattaccatacaacggtactgcacttgcagtcagtgatcagcgacgagaaatgattcgccaagcagcttttaaattagttgaaaatattaaaaatgatttaaaaccacgtgatatcgttactcgcgaagcaattgatgatgcatttgcacttgatatggctatgggtggttcaacaaacacggtactgcatacgttagccattgccaatgaagctggtattgattatgacttagagcgcattaatgctattgccaaacgcacgccatatttatcaaaaatagcacctagttcatcgtattcaatgcatgatgtgcatgaagctggtggcgtcccagcaattattaatgaattgatgaagaaagatggcacgttacacccagatagaatcacagttactggcaaaacgttacgtgaaaataacgaaggcaaagaaattaagaactttgatgtcattcaccctcttgatgcaccatatgatgcacaaggcggtttatctatcttatttggtaatatcgcccctaaaggcgcagttattaaagttggcggcgttgatccatctatcaaaacatttactgggaaagcaatttgtttcaattcgcatgatgaagctgttgaagcaatagacaatcgtaccgttcgtgcaggccacgtcgttgtcattagatatgaaggacctaaaggtggaccaggtatgcctgaaatgttagcacctacttcctctattgttggtcgcggcttaggtaaagatgttgcattaattactgatgggcgtttttccggtgccacaagaggtattgcagttggtcatatttcccctgaagctgcatctggtggaccaattgccttaattgaagatggtgatgagattactattgatttaacaaatcgtacattaaacgtaaaccagcctgaagatgttctagcgcgtcgccgagaatctttaacaccatttaaagcgaaagtaaaaacaggttatctagctcgttatactgccctagtaactagcgcaaatacaggtggcgtcatgcaagtccctgagaatttaatttaatttatttttatattggagatggttaaaatgtctaaaactcaacatgaagtaaaccaaaatattgaccctttaaaaatggctgaatcacttgaacctgaacaactaaatgaaaaaactttaaatgatatgcgttcaggatcagaagtgctagtagaagctctacttaaagaaaatgtggattatttattcggttatcctggtggtgccgtactacctttatatgacacgttttatgatggtaaaatcaaacatattttagcaagacacgaacaaggtgctgttcatgctgcagaaggttatgcacgtgtatctggtaaaactggcgtcgttgtagttacaagcggtccaggtgcaactaatgtaatgacaggtattacggatgcacattgcgactctttacctctagttgtattcactggacaagttgctacaccaggcattggtaaagatgcattccaagaagcggatattctatctatgacttcaccaattacaaaacaaaattatcaagtgaaacgtgttgaagatatccctaaaatcgtacacgaagctttccatgtagctaattctggacgcaaaggtcctgtagtgattgattttccaaaagatatgggtgttttagctacaaatgtggatttatgcgacgaaatcaatattccaggttatgaagttgttacagaaccagaaaataaagacattgacactttcatctcacttttaaaagaagcgaaaaagcctgtcgtattagccggcgcaggtattaatcaatcaaaatcaaatcaattattaacacagtttgttaataaacatcaaatcccaacagttactactttactaggtctaggtgctgtaccttatgaggatacactatttttaggtatgggaggaatgcatggttcttatgctagtaacatggcattaactgagtgtgatttactcattaatttaggtagccgcttcgatgatagattagcaagcaaacctgatgcctttgcacctaacgccaaaattgtacatgtagatattgatccttcagaaatcaataaagttattcatgtagatttaggtattattgcagactgtaaaagatttttagaatgtttaaatgataaaaatgttgagactatagaacacagtgactgggttaaacattgtcaaaataataagcagaaacacccatttaaacttggtgaagaagatcaagtattttgtaagccacaacaaacaatcgaatatatcggcaaaattacaaatggtgaagcaattgttactacagacgtgggacaacatcaaatgtgggcagctcaattttatccatttaaaaatcacggacaatgggttacaagcggtggtttaggaacaatgggattcggtattccttcgtcaattggtgccaaattagctaatcctgataaaacagtcgtatgtttcgtcggtgacggtggtttccaaatgacaaaccaagaaatggcacttttacccgaatatggtttagatgtcaaaatcgtactaatcaataatggaacattaggtatggttaaacaatggcaagataagttctttaatcaacgcttctcacactcagtatttaatggtcaacctgattttatgaaaatggcagaagcatatggcgtcaaaggtttcttaatcgataagccagaacaactggaagaacaattagatgcagcgtttgcttatcaaggaccagctttaattgaggttcgtatttcccctactgaagctgtaaccccaatggttccgagtggcaaatcaaatcatgaaatggagggcttataatgacaagaattcttaaattacaagttgcggatcaagtcagcacgctaaatcgaattacaagtgcttttgttcgcctacaatataatatcgatacattacatgttacacattctgaacaacctgggatttctaacatggaaattcaagtcgatattcaagatgatacatcacttcatatattaattaaaaaattaaaacaacaaattaatgttttaacggttgaatgctacgaccttgttgataacgaagcttaattttaagacaaaggcaatgatgcgctaattagttatagatatatcataggctgctagttaacatctgccactattacaaagttatatttcagaattttcgaaacacaaaatatttaattatttggaggaatttattatgacaacagtttattatgatcaagatgtaaaaacggacgctttacaaggcaaaaaaattgcagtagtaggttatggatcacaaggtcacgcgcatgcacaaaacttaaaagacaatggatatgatgtagtcatcggcattcgcccaggtcgttcttttgacaaagctaaagaagatggatttgatgtgttccctgttgcagaagcagttaagcaagctgatgtaattatggtgctattacctgatgaaattcaaggtgatgtatacaaaaacgaaattgaaccaaatttagaaaaacataatgcgcttgcatttgctcatggctttaacattcattttggtgttattcaaccaccagctgatgttgatgtatttttagtagctcctaaaggaccgggtcatttagttagacgtacatttgttgaaggttctgctgtaccatcactatttggtattcaacaaggcgcttcaggtcaagcacgtaatattgctttaagttatgcaaaaggtattggtgcaactcgtgcaggtgttattgaaacaacatttaaagaagaaactgagacagatttatttggtgaacaagcagtactttgcggtggtgtatcgaaattaattcaaagtggctttgaaacattagtagaagcgggttatcaaccagaattagcttattttgaagtattacatgaaatgaaattaatcgttgatttgatgtatgaaggcggtatggaaaatgtacgttactcaatttcaaatactgctgaatttggtgactatgtttcaggaccacgtgttatcacaccagatgttaaagaaaatatgaaagctgtattaactgatatccaaaatggtaacttcagtaatcgctttatcgaagacaataaaaatggattcaaagaattttataaattacgcgaagaacaacatggtcatcaaattgaaaaagttggtcgtgaattacgcgaaatgatgccttttattaaatctaaaagcattgaaaaataagatagacctacaatgaggagttgttaaatatgagtagtcatattcaaatttttgatacgacactaagagacggtgaacaaacaccaggagtgaattttacttttgatgaacgcttgcgtattgcattgcaattagaaaaatggggtgtagatgttattgaagctggatttcctgcttcaagtacaggtagctttaaatctgttcaagcaattgcacaaacattaacaacaacggctgtatgtggtttagctagatgtaaaaaatctgacatcgatgctgtatatgaagcaacaaaagatgcagcgaagccggtcgtgcatgtttttatagcaacatcacctattcatcttgaacataaacttaaaatgtctcaagaagacgttttagcatctattaaagaacatgtcacatacgcgaaacaattatttgacgttgttcaattttcacctgaagatgcaacgcgtactgaattaccattcttagtgaaatgtgtacaaactgccgttgacgctggagctacagttattaatattcctgatacagtcggctacagttaccatgatgaatatgcacatattttcaaaaccttaacagaatctgtaacatcttcaaatgaaattatttatagtgctcattgccatgacgatttaggaatggctgtttcaaatagtttagctgcaattgaaggcggtgcgagacgaattgaaggcactgtaaatggtattggtgaacgagcaggtaatgcagcacttgaagaagtcgcgcttgcactatacgttcgaaatgatcattatggtgctcaaactgctcttaatctcgaagaaactaaaaaaacatcggatttaatttcaagatatgcaggtattcgagtgcctagaaataaagcaattgttggccaaaatgcatttagtcatgaatcaggtattcaccaagatggcgtattaaaacatcgtgaaacatatgaaattatgacacctcaacttgttggtgtaagcacgactgaacttccattaggaaaattatctggtaaacacgccttctcagagaagttaaaagcattaggttatgacattgataaagaagcgcaaatagatttatttaaacaattcaaggccattgcggacaaaaagaaatctgtttcagatagagatattcatgcgattattcaaggttctgagcatgagcatcaagcactttataaattggaaacactgcaactacaatatgtctctagcggccttcaaagtgctgttgttgttgttaaagataaagagggtcatatttaccaggattcaagtattggtactggttcaatcgtagcaatttacaatgcagttgatcgtattttccagaaagaaacagaattaattgattatcgtattaattctgtcactgaaggtactgatgcccaagcagaagtacatgtaaatttattgattgaaggtaagactgtcaatggctttggtattgatcatgatattttacaagcctcttgtaaagcatacgtagaagcacatgctaaatttgcagctgaaaatgttgagaaggtaggtaattaattatgacttataacattgttgccctacctggtgatggaatcggtccagaaattttgaacggatctctatcattgcttgaaattataagtaataaatataactttaattatcaaatagagcaccacgaatttggtggtgcctctattgatacattcggcgagcctttaactgagaaaaccttaaatgcgtgtaaaagagcagatgctattttactgggtgcaatcggtggacctaaatggacagatcctaacaatcgaccagaacaaggattattaaaattgcgtaaatccttaaatttatttgtaaatatacgccccactaccgttgtcaaaggcgctagttctttatcacctttaaaggaagaacgcgttgaaggcacagatttagttatagtccgtgaattgacaagtggtatttattttggagaacctagacattttaataatcacgaggccttagattctcttacttatacaagagaagaaatagaacgcattgttcacgtagcatttaaattggccgcttcaagacgaggaaaactaacatcagttgataaagaaaatgtattagcttctagtaaattgtggcgcaaagtcgtaaatgaagtaagtcaattatatccagaagtaacagtaaatcacttacttgttgatgcttgtagtatgcatttaatcacaaatccaaaacaatttgacgtcatcgtatgtgaaaacttatttggcgatattttaagtgatgaagcttcagtgattcctggttcacttggtttatcaccttctgctagttttagtaacgatggtccaagattgtatgagcctattcatggatcagcaccagatattgcaggtaaaaacgttgccaatccatttggaatgattctatctttagcgatgtgtttacgtgaaagcttaaatcaaccagatgctgcagatgaattagaacaacatatttatagcatgattgaacatgggcaaacgacagcagatttaggcggcaaattgaatactactgatattttcgaaattctatctcaaaaattgaatcactaagggggagatgtaaatgggtcaaacattatttgacaaggtgtggaacagacatgtgttatacgggaaattgggcgaaccgcaactattatacattgatttacaccttatacatgaagttacttctcctcaagcatttgaaggacttaggcttcaaaacagaaaattaagacgcccagatttaacatttgcaacactcgatcacaatgttcctactattgatatattcaatattaaagatgaaattgcaaacaaacaaatcacaacattacaaaaaaacgccatagattttggggtgcatatttttgatatgggttctgatgaacaaggtattgttcacatggtaggacctgagacaggacttacacagcctggcaagacaatcgtttgtggtgactctcacacagcaacacatggagcatttggtgctattgcatttggaattggaacaagtgaagttgaacatgttttcgcaactcaaacgctatggcaaacaaaacccaaaaacttaaaaatcgatattaatggtaccttaccaacaggcgtctatgctaaggacattattctgcatttaattaaaacgtatggtgttgactttggtacaggctatgctttggaatttactggcgaaacaattaaaaacctttcaatggatggtcgaatgactatttgtaacatggctatcgaaggtggtgccaaatacggcataatccaacctgatgatataacatttgaatatgttaaagggagaccatttgccgataacttcgctaaatcagttgataagtggcgtgagctatattctgatgacgacgcgatatttgatcgtgtaattgaacttgatgtttcaacattagaaccacaagtgacatggggaactaatcctgaaatgggtgttaatttcagtgaaccattccctgaaatcaatgatatcaacgatcaacgtgcgtatgattatatggggttagaaccaggtcaaaaagctgaagacatcgacttagggtatgtttttctcggttcatgtacaaatgctagactatcagatttgattgaagctagtcatattgttaaaggaaataaagttcatccaaatattacagctattgtcgtaccaggttctcgtacagtaaaaaaagaagcagaaaaattaggtctagatactatctttaaaaatgcaggatttgaatggcgtgaaccaggatgttcaatgtgtttaggcatgaatcctgaccaagtacctgagggcgtacattgtgcatctacaagtaatcgaaactttgaaggacgacaaggcaaaggtgcaagaacacatttagtatcccctgctatggcagcagcagcagctattcatggtaaatttgtggacgtaagaaaggtggttgtttaaatggcagcaatcaaacctattacaacatataaaggtaaaatagtccctctcttcaacgacaatatcgatacagaccaaatcattcctaaggtacacttaaagcgtatttcaaaaagtggctttggtccatttgcttttgatgaatggcggtacttacctgatggttcagataatcctgatttcaatcctaacaaaccacaatataaaggggcttctattttaattactggagataattttggatgtggttcaagtcgtgaacatgctgcttgggctcttaaggactatggttttcatattattattgcaggaagtttcagtgacatattttatatgaattgcactaaaaatgcgatgttgcctatcgttttagaaaaaagtgcccgtgaacatcttgcacaatatgttgaaattgaggtcgatttaccaaatcaaactgtgtcatcaccagacaagcgtttccattttgaaattgatgaaacttggaagaataaacttgtaaatggcttagatgacattgcaatcaccctacaatatgaatcattaatagaaaaatatgaaaaatcactttaagggagttgaatattatgacagtcaaaacaacagtttctacgaaagatatcgatgaggcatttttaagacttaaagatattgtcaaagaaacacctttacaattagaccattacttatctcaaaagtatgattgtaaagtctatttaaaacgagaagatttacaatgggtacgttcttttaaattaagaggtgcttacaacgctatttctgttttatcagatgaagctaaaagtaaaggtattacatgtgcaagtgcaggtaatcatgctcaaggtgttgcctatacagctaaaaaacttaatttaaacgctgttatctttatgccagtcactacacctttacaaaaggtaaatcaagtaaagttctttggaaatagtaacgttgaagttgtactcactggtgatacatttgatcactgtttagctgaagctttaacttatacaagtgaacatcaaatgaactttatagatccattcaataatgttcatacaatttctggacaaggtacgcttgctaaagaaatgctagaacaagcaaagtctgacaatgttaactttgattatctatttgccgcaattggtggtggcggtttaatttcaggtattagtacttactttaaaacctattcacctaccacgaaaattataggtgttgaaccttcaggtgcaagtagtatgtatgaatctgttgtggtaaataatcaggtagtcacattgcctaatatcgataaatttgtggacggtgcatctgtagctagagttggcgatattacatttgaaattgcaaaagaaaatgtagatgattacgttcaagtagatgaaggtgcagtttgttctacgattttagatatgtattcaaaacaagcaattgtagcagaacctgctggcgcattaagtgtaagtgcgcttgaaaactataaagatcatattaaaggtaaaacagtggtttgtgtcattagtggtggtaataatgatattaatcgaatgaaagaaattgaagaacgttcattactatacgaagaaatgaagcattactttatcttaaatttccctcaacgtccaggtgcattgagagaatttgtaaatgacgtattaggacctcaagacgatattactaaatttgaatacttaaaaaaatcttctcaaaatacaggtactgtcattattggtattcaacttaaagatcatgatgatttaatacaactcaaacaacgtgtaaatcatttcgatccttccaatatttatattaatgaaaataagatgttatattcattgttaatttaacacatagtaagaaaaacagtcataaattgatttctaattgaaatcatcttatgactgctttttattatactttacatttctcgtttcgtcagattcaaacgttttcacttcgccaagccatctttctttgtgtttgcttttattttgacgttttagacataaaaaaagagaccttgcggtctcaatgcggctcatcgcatccactttttgcctggcaacgttctactctagcggaacgtaagttcgactaccatcgacgctaaggagcttaacttctgtgttcggcatgggaacaggtgtgacctccttgctatagtcaccagacatatgaatgtaaattatacattcaaaactagatagtaagtaaaagtgattttgcttcgcaaaacatttattttgattaagtcttcgatcgattagtattcgtcagctccacatgtcaccatgcttccacctcgaacctattaacctcatcatctttgagggatcttataaccgaagttgggaaatctcatcttgaggggggcttcatgcttagatgctttcagcacttatcccgtccacacatagctacccagctatgccgttggcacgacaactggtacaccagaggtatgtccatcccggtcctctcgtactaaggacagctcctctcaaatttcctacgcccacgacggatagggaccgaactgtctcacgacgttctgaacccagctcgcgtaccgctttaatgggcgaacagcccaacccttgggaccgactacagccccaggatgcgatgagccgacatcgaggtgccaaacctccccgtcgatgtgaactcttgggggagataagcctgttatccccggggtagcttttatccgttgagcgatggcccttccatgcggaaccaccggatcactaagtccgtctttcgaccctgctcgacttgtaggtctcgcagtcaagctcccttatgcctttacactctatgaatgatttccaaccattctgagggaacctttgagcgcctccgttaccttttaggaggcgaccgccccagtcaaactgcccgcctgacactgtctcccaccacgataagtggtgcgggttagaaagccaacacagctagggtagtatcccaccagcgcctccacgtaagctagcgctcacgtttcaaaggctcctacctatcctgtacaagctgtgccgaatttcaatatcaggctacagtaaagctccacggggtctttccgtcctgtcgcgggtaacctgcatcttcacaggtactatgatttcaccgagtctctcgttgagacagtgcccaaatcgttacgcctttcgtgcgggtcggaacttacccgacaaggaatttcgctaccttaggaccgttatagttacggccgccgtttactggggcttcgattcgtagcttcgcagaagctaaccactcctcttaaccttccagcaccgggcaggcgtcagcccctatacatcaccttacggtttagcagagacctgtgtttttgataaacagtcgcttgggcctattcactgcggctcttctgggcgttaaccctaaagagcaccccttctcccgaagttacggggtcattttgccgagttccttaacgagagttcgctcgctcaccttagaattctcatcttgactacctgtgtcggtttgcggtacgggcacctattttctatctagaggcttttctcggcagtgtgaaatcaacgactcgaagactcaatgtcttctccccatcacagctcagccttaacgagtaccggatttgcctaatactcagccttactgcttagacgtgcaatccaatcgcacgcttcgcctatcctactgcgtccccccatcgattaaaacgattataggtggtacaggaatatcaacctgttatccatcgcctacgcctgtcggcctcagcttaggacccgactaacccagagcggacgagccttcctctggaaaccttagtcaatcggtggacgggattctcacccgtctttcgctactcacaccggcattctcacttctaagcgctccacatgtccttacgatcatgcttcaacgcccttagaacgctctcctaccattgtccaaaggacaatccacagcttcggtaatatgtttagccccggtacattttcggcgcagtgtcactcgactagtgagctattacgcactctttaaatgatggctgcttctaagccaacatcctagttgtctgggcaacgccacatccttttccacttaacatatattttgggaccttagctggtggtctgggctgtttccctttcgaacacggaccttatcacccatgttctgactcccaagttaaattaattggcattcggagtttgtctgaattcggtaacccgagaggggcccctcgtccaaacagtgctctacctccaataatcatcacttgaggctagccctaaagctatttcggagagaaccagctatctccaggttcgattggaatttctccgctaccctcagttcatccgctcacttttcaacgtaagtcggttcggtcctccattcagtgttacctgaacttcaacctgaccaagggtagatcacctggtttcgggtctacgaccaaatactaaacgccctattcagactcgctttcgctacggctccacatttactgcttaaccttgcatcaaatcgtaactcgccggttcattctacaaaaggcacgccatcacccattaacgggctctgactacttgtaagcacacggtttcaggttctatttcactccccttccggggtgcttttcacctttccctcacggtactggttcactatcggtcactagagagtatttagccttaggagatggtcctcccagattccgacggaatttcacgtgttccgtcgtactcaggatccactcaagagagacaacattttcgactacaggattattaccttctttgattcatctttccagatgattcgtctaatgtcgtcctttgtaactccgtatagagtgtcctacaaccccaacaagcaagcttgttggtttgggctcttcccgtttcgctcgccgctactaagggaatcgaattttctttctcttcctccgggtactaagatgtttcagttctccgggtgtgccttctgatatgctatgtattcacatatcgataacatgacataactcatgctgggtttccccattcggaaatctctggatcaaagcttacttacagctccccaaagcatatcgtcgttagtaacgtccttcatcggcttctagtgccaaggcatccaccgtgcgcccttaataacttaatctatgtttccaccatttttataagtcaaacgctacatgaagttacgttcttttataaaaagatttaaacgcgttattaatcttgtgagtgttctttcgaacactagcgattatttcttatgaattcaagcttatttaaaactctttattcactcggttttgcttggtaaaatctatattttacttacttatctagttttcaatgtacaatttctttttagtcaagcgctcgcatactgctttattttcataagcaatatcactttaaccaaaaaatatttgaatgttaaataaacattcaaaactgaatacaatatgtcacgttattccgcatcttctgaagaagatgttccgaatatatccttagaaaggaggtgatccagccgcaccttccgatacggctaccttgttacgacttcaccccaatcatttgtcccaccttcgacggctagctcctaaaaggttactccaccggcttcgggtgttacaaactctcgtggtgtgacgggcggtgtgtacaagacccgggaacgtattcaccgtagcatgctgatctacgattactagcgattccagcttcatgtagtcgagttgcagactacaatccgaactgagaacaactttatgggatttgcttgacctcgcggtttcgctgccctttgtattgtccattgtagcacgtgtgtagcccaaatcataaggggcatgatgatttgacgtcatccccaccttcctccggtttgtcaccggcagtcaacttagagtgcccaacttaatgatggcaactaagcttaagggttgcgctcgttgcgggacttaacccaacatctcacgacacgagctgacgacaaccatgcaccacctgtcactttgtcccccgaaggggaaggctctatctctagagttgtcaaaggatgtcaagatttggtaaggttcttcgcgttgcttcgaattaaaccacatgctccaccgcttgtgcgggtccccgtcaattcctttgagtttcaaccttgcggtcgtactccccaggcggagtgcttaatgcgttagctgcagcactaaggggcggaaaccccctaacacttagcactcatcgtttacggcgtggactaccagggtatctaatcctgtttgatccccacgctttcgcacatcagcgtcagttacagaccagaaagtcgccttcgccactggtgttcctccatatctctgcgcatttcaccgctacacatggaattccactttcctcttctgcactcaagttttccagtttccaatgaccctccacggttgagccgtgggctttcacatcagacttaaaaaaccgcctacgcgcgctttacgcccaataattccggataacgcttgccacctacgtattaccgcggctgctggcacgtagttagccgtggctttctgattaggtaccgtcaagatgtgcacagttacttacacatatgttcttccctaataacagagttttacgatccgaagaccttcatcactcacgcggcgttgctccgtcaggctttcgcccattgcggaagattccctactgctgcctcccgtaggagtctggaccgtgtctcagttccagtgtggccgatcaccctctcaggtcggctatgcatcgttgccttggtaagccgttaccttaccaactagctaatgcagcgcggatccatctataagtgacagcaagaccgtctttcacttttgaaccatgcggttcaaaatattatccggtattagctccggtttcccgaagttatcccagtcttataggtaggttatccacgtgttactcacccgtccgccgctaacatcagagaagcaagcttctcgtccgttcgctcgacttgcatgtattaggcacgccgccagcgttcatcctgagccaggatcaaactctccataaaaattatgatgtttgattagctcataaatactaaataatgtttgtaacttatagttacgtttttggaattaacgttgacatattgtcattcagttttcaatgttcattaaaattatctatggagcgggtgatgggaatcgaacccacaacatcagcttggaaggctgaggttttgccattaaactacacccgcttatttaaattaagaattttgatgcggccgagaggacttgaacctccacgggatttctcccactaggccctcaacctagcgcgtctgccattccgccacgaccgcggatataggcatttaaaacatcttcgtttttcagaacgttatttattatattatgtttaaaaatatttgtcaataacttttaatcgtttttttacattaaattaatttgtgttatcagttgttaacacaacgctatttataataaaacatttagaacttattgtcaacatattttataaattaaatttagaattgactgtctttcaaatcaaagtttatttaatttgttcttttttaaggaacgtgtttaatcatactaactataagctgtacagtcaatagaaaagttcaatcaaaatgtcatgaaaaatgtataattatcttttgtgctactttaaagctttaattgggtaaagtttatatattaattattactaaaatacgccaagatttttaatctaatcattttaatttcatcctatcaagccacaatttatgccattacctatatcataagtagaaaagccgagattgcgaagtattaaattacgacaatctcggctttaaacattttataaacacaatttcttcttattcaattactatgtttaccaatcaaaataactcactgataaattctatataaattccatacaactcataaataatcttacatatacacgaattagctctatttgtattgtacttatttcaattgtcttttcattcttaattttccattgcaatgtccgcaacgcatacgattcgtatcaactttacggatacgtatatattttgcatgacatttagtgcaataatattcataatttgcccgttgttgatagctttcaatgctgttacaaaatctaggcgctccaacctgttggctcaatcgtttaaaatcttgatctttatgttgataacctttaccagcaatatgcaagtgataatgacacaattcgtgcagtataatttttacaacagcatcttctccataatgctcatattgttttggattaatttcaatatcatgggactttaaaagataacgtccgcctgttgtacgtaaccttttattaaaatatgcacaatgtcgaaacgtacgtccaaatttttcttccgaaagattctcaaccattcgctgaagtttgtcattattcatgtggatcaatcatcgttaatgatactttgtctttatttttgtcaatactgtaaatccaaacgtcaacgatatcaccaacactgacaatatccattggattttttacgaacttcttagaaagtttcgaaacatggacaagtccatcttgtttaacacctatatctacaaatgctccaaaatctactacatttctaactgtaccactcaatttcattccttcttgtaaatcttcaattgatagcacatcggatttaaggattggtgtttcaaactcgtcccttggatctcgattaggtgctttcaaggatttaataatatcctctaatgtaggtacaccgacttgtaattcaatcgccagttcatccatatccaatgaatttaatttagcttttaatgcatcactacctaaatcattgccaccaaatccgagtttatctaataactgatacgttactttatagctttcgggatgaatcgatgtattatccaatggctctgaaccgtctactattcttaaaaatcctatactctgctcaaaagttttagcacccaaacgcttaatcttgcttaactctttattatgctttattgcgccattttcttctctatatgcaattatatttttagcaatttgcgaacttagaccagacacatattgtaataatgatgatgatgctgtattgacatcaacacctacttggttaactgctgtttcaacaacgaaagttaatgcattttctagtgctttttgattaacatcatgctggtattgtccgacaccaatagatttaggatcgattttaactaattcacttaatggatcttgaacgcgtcgtccaattgatacggcacttctttcttccacttgaaaatcaggaaattcatctctagcaatttctgatgctgagtatactgaagcgcccgcttcattgacaatgatgaattgtactggcaactgatgctttttaattaaatctgcaacaaattgttctgtttcacgacttgcagtaccattgccaattgcaattaattgcacatcatacgctttaaccatttgtacaaaatccttctctgctgcctcttttttagaaactggtggatgcggataaatcacaccttttgctataaaagtaccgaatgggttaatgactgctaatttacaacctgttctaaatgctggatctacgcctaatatttgtttacctttcattggaggttgcagtaatagatttcttaagttttcactaaaaacatctattgcatgattttcagctttttcagttaaatcagcatggatttcacgctctatcgaagggacaattaagcgtttcaagctatctttaatcgcctctaaaatataactgcgatttacattattatgattgatttcttgacgtgcaatgaaatcctctactgatgtcgtatcgaattcaaactttacagataatactttctctttttcaccacgattaacagctaaaactctatgattagcaatgcgtttaattggctcactatatgcatagtacatttcaaaaatacctttttcatcttcagcatttttctttttagatgtagttaacacaccttgatgatacatatcttttaaaatttttgttctatatttaggattatctgaaatttgttccgcaataatatcttgtgcacctttgatagcatcttcaaccgattgcacttcttcatttataaattgttgtgctttttcttcaattgagacttcatgtttacgtgccttcatccatatcgctaatggctctaaccctttacgtttcgcctcagttgcccttgtctttttcttttgtttaaaaggcctatataggtcttcaacacgttgtaatttgttctgttttaaaatatccttctttaattcctcagtaagtaatccttgctgttctatatttttgataacttcttctttacgtttttgtaaattgaccatatattggtattcgtcatcaatttgctttatttgaacttcatctagtccaccagtttgctcttttcgatacctcgcaataaatggtactgtatttttttcttctagcagtgttaatactgcttcaatttgttttttactaaattgatatttctctatgattgaattaatcaattgattgtccatttacttaacccacactttttcttaaatttactcatttattttaacatattctaaaatacttctattaaggtatgatacttaatgtaattttcacttccaaaacatttaaaacgaatgattaggtcatactatattttaaaacgcactaagattattgaaaatgacacaccatcatttctaaatttcataatctaagactactttttttattctaatagcaacccacctatttaaaacgacaattagatatcttcttcacttaaattattaatactatatcgcgacatttatgtggatacacattaaactacactaataatgtattaattcgaaaatcttaattaaattaaaaatacccctcgatttcaatttaataatcaagggataattatatggatttttcattataaaacgtatcattaataaacaaattctattgatgtgctgcttcttgtaatttcttaattgccgttctctgaagtcgtgatacatgcatttgacttaaaccgatacgctcacctgtctctttttgactcaatccttcaataaacgtacattgtatgatttctcgttcgcgatcagataatataggtaatattttttctaaaatcatacgtttttcagttaagtcataatggtcatcttgttgccccataatatctaatagcgtaacagttgaaccatctttatcagcttcaatggaatgatcaacacttaacgcattataactttgtcccatttccattgcttctaacacttcttcttctgagacttctaatcgatcagctatttcactgatagaaggtgaacgctctaattcagcggttagttcatcgctcacttttttgattcttggcccaatttctttaatacgtctcggaacatgtacactccaagttttatctcgtagatatcttttgatttcaccgattacagtaggtactaaaaaggcttcaaacttccgttcaaaggacatatcgaatctatttatggcacctattaaaccaaccataccaacttgaactaaatcttcgtgatgtgattgtcctttagaatatttatatgccaatgactcaattagtttttggtaatgtttaactaacttatcctgtgcatctgtattcttattttcttggtgttctttaatccattggttaatttgctcaggtgaaatttcattagctgatttcgactctttcgccattatttcgcacctgctctttttttatatacttagtcatactgattgtcacaccagattctttatatactgtgacttcatccattaaagattcgattaaaaataaacctaggccaccttcgcgtaaaaagtctatattttcgtctttatcgtaaggacctatttttgatttagttgtttcataatcaaaactgtcacctttatcagaaataacaattttaattttatcttctaaaatttcaaaatatatgttaataatgcccacattgttattttctttgtatgcatgtttaactgcatttgtcacagcttcactaactgcaatcttggcatcttcaatatcatcatatgtagcaccagctctcgaaaaaacgccagaaagtgttaaacgaattaaacttacatactctgccgatgctggcacgcgcatttcgataaaatcttctttagattgcatgttattcgacctccgttccttcattaacatgcattaaatccttaagaccagtaatttcaaatagtctaccgatacgatctgacacacctaaaatgtatagttctttatcattttggtttaatgcttttaatgtacctacgaataaacctaaacctgtcgaatccatataactcacattttctaaattaacataaatatcacgagttccatcttgtctcataggtgttaaaacctcttctaattcaggcacagtataaacatctaattctccaccgactttaacttcgtaaaatttatcttgagtggttgtttctatattaagattcatttcattacactcctacttattaaaaatatttatcttcattttaagcgctgtatccaccatatttatatttcaaattattatatacccatcgaaataatttctaatcttcttttttaaattaatttactctttttataatcaaaatagtcatatcatcttttttatttgggttttgaagctttaaaattgcttcatagataatttgaacaatatcttgtgggtgcatatgtttatgttttttaatatattctaaaagtttttgtttatctataaaggtaccttcactatttctagcttcagtcacaccatccgttaaaatgataattaaatcatcaaggtatattggaatttcttgttgttgatatcgtgtttgtgaactgattcctaacactctacctctaactgaaatttcttcaaattcttctttttcagcgcgataaatatatccaggctcatgaccagctgaactacaatacaataaatggttcatttcttcatataaaccataaaacattgtgacgaacatattttgattaatattcttttcaacaacacgatttaaacgttttaaaccatcactcggtaattgtgagtgtccataagaatccatgccaaactttatcatactcattgctaaagcagctggtataccttttccaatgacatctgcaacagcaaagctcattgtgccatcgttatggtcaattaaattaaaataatctccacttactttttgtgccgccactgaaataacgccaatttgaatactatcaaattgtggaatatctgttttaagcattgtttgttgtaagctagaagctaagtctatctctttatcgtgaacttgaagtttatctaccaatctttgataatctcgataactataaccaaagcctttaacgatttcttgtaagacatctaatgtcttgaacacatcttcacgcgttaagtttaacgtcaatatatagtttttgtgaatatcgacaatgtcttcaggcaagacgtccttacgaatcacttcgtcagtgtatttctcacacttttttatcaattctactttatcttggcacgttaaactttcatcaattaaacccttataatgttgcttaaattcttccacgattagttgcctcctcacttcccttacaaagcaaatgcttaagcaaggataattatgattcacttactaacatttatttaattgcacttatcaattttgtcgtttgcaattttgctgtagatgatacttttaagctaaaaaaactttaggatggaatacctaaagcctaaaaaacttaagacatccttttataataaaaaatatgaatatcataactggtatttgctaaaatctttgtttataagaaaattcttcgtacagaatttagaaatagttataattattataaagttattgtcttttatatcaatattttatttatctctgaaaaatacatataatagacgcctaatttttctggtgagctactgcattcagccctaaactaatcattagtgcattatctacttctttcattttatcatcggataagtacgtcagtttttctttcaatcgttttttatcaagtgtacgaatttgttctaataatataactgagtctttatccaacttatactttttcttttcaatctctacatgtgtcggtattttcgctttattaatcctaccagttattgccgcaacaataactgtaggactatatttattaccagtatcattttgaattatgactacaggtctgactcccccttgttcagatccctgtactggtgataaatctgctaaataaacatctcctcgtctaatcattcattcgttgaattagaagataaatatgtttcgttgcaatcgcatgcttcacactctatcggaaaagcttcgttcgctagggagagatttaaatcagccatttgtgaatatccttcttttaaagattgttctaagctatgacttctattttgactaaaagataacatatgagaacctccaattgattccaaaagttattaaatgacctttaattactctaatgataacaaattttatatgcactgaccatattattttaacaattcatttgttacaaaacgttgatcaccatcatgatagattcgcggcaaacgtctcgacaagttacaaagcacttcataattaatagtatgttgcttttcagctaccacctctaccgactgtggactttctctatgattatctattaaaatcaccgaatctccagctttaacttgatctggcactttaacaattgtctgatccatacatacgcgaccaataacttcgcattgatgaccatttacatttacaaagctaccttgcattatgcgtaaatagccatctgcatatccaataggtaacaatgctattgtagttgggtcagtagctgtataagttgcaccataacttacagactcacccgcttgtagcgtctttgtttgaactacattagcaattaattgcacacttggtttaaggtgtactttaactttttgctgtacatactctgatggataatatccataaagggaaattcctggtcttattgcattacagaattggcaatccattaatagagagcctgctgagttctgacaatgtatatattcaggtttaattgcttcattgaccatatctttaaaacgttgatattgttcagttgtcatatctcctggttcgtcagcacaggcaaagtgtgtaaacacgccttcaaatacaagttgctcatattgttgaatgatttcaatcacttcttgatacgttttagtatctttaatacctaaacgtcccattcctgtatctaatttaatgtgcaaccataactttttctcttgctcaccagaaatgtttttaattgcttctttcaaccactgtttagacggaaccgttaaggcaactcggtgttgtatcgctttatcaatatctttagctggtaacacacctaagactaaaattttagcagtaatcccatgcattctaagttctatcgcttcatctaacgttgctacagcaaaaaatgtggcgccattttccattaaatgacgtgctactttaacactacctagtccataggcattggctttaacgacagccatcactgttttatttggatgcaatgtactgaatactttgaaatttgatgcaacagcgtttaaatctacattcatatacgcagatctataatatttatccgacatattacttcctcctgtaattcccacacgttttaaaactagatcttaattatcattgtataacaaatttaaaatgctgacttttctaaaacaacttggctcatcgcataatgctcagtgtgtgagatactaacatgtacgataaacccttcgtaatcaatctttggtttgccaagttcgtcgttgtaacagtctatatcgttaaaagctacatgttttcctaagcctgtgcctaatgctttactgaacgcttcttttgtagcaaacctgccagctaaaaattcaattttacgttgctcatgtgtgaaattgttgaatttgtgctgttcatttttagttaaaatccgctcaaccaattttggttgcttactatataacgcttgtattcgatcgatttcgattaaatctacaccaattccatgtatcattgattattcctcatttttattgttttctaaatgtctctcgttatttaaccatcgtttcaatctacgtgcttcacttctatctattaattcaatttcagcttgaccacccgctgtataaagggtcaaagttgctaatcgatagcgtctcattataggaccaacatcgatatcaatattttgaatacgaaaatatggtattaccttttcatccaaaaataaaatgccgtttcgtacacgcaaatggtgtttttcaaatgcatatctgcagtgcttatatcgatagactggcgctataacaagcgtgaaaacagcaacaagtaatattataatcacactactaacaatggataaatggttatctaaaatctcccaaaatagccagttcaaaatattaaatgcgattaaaagtacaagcgctatgggtatccaaaacagcacagcacttaacctcatcacttttttagcgtgtggtgacataaaattataatccctcatcattttcacctcttaaataccatgatttcaatttatttgcatcttcacttcttgcgtattttaagttaatcgattgggctcccacacctttagcaacaataaagctaaaattatttaaattgttgcgtttaagtaatgtatgttgccaagtgtcaaatcctataatgtgatgcgctttaaaataataaatatttcgtttcaatagctcgaaattctggatagtaatttgttcttctgtcattttaaaacccgcatgtttgacataaagatatcctttgatcacaaataaaccaataatgactattgttataatcgtaaataacaataataattgattccaaaaataacagcctatacctgccatagctatgacaataatactaggtattaaaaagtgtctgtggaaacctgacaaaggcataccttcattaacttgttgataagataaatctggtactaaattctggataatttgatatgctttgtctcgtttaataaacggcaatatcggcacactacctgaatcattgtcatcatcttcgatttttttattttcaaaatcacttgtgatgataaaatgtattgctgtgtagccaaataatcttcgtatatatgactgacgttcaacaacagcttgcaatcgtttcgttggtacagttactttcttcttgttaaagagaccatattcaattttaagttgctcattttcaagcatcaccgaaaagccataaaatcttatcattgttataatcgttccaataatatatgccactattaatactagtaaaatgatgattaatactgaaatacttacaatttgaacccattgactaatttcatgatttagcttcgaccatgggatcaactctcttacagccccgtaaatcggtactaaagctgctaacgttacaccaatggcgccactggtcattgccataaatagtgattctttaaaattcatctgatatataggaatgcgtttatttttctgattaagcatactatcagtgttctgcacttcatctaagcgaccttctgcgatgtcttccacattaccttcaatgtcatgattacagttgtcattcttctcagcactagacttttgcgccacttctgtcttcaactctgtttgcaattgatcaatatatcgttcaagatattcaccttgttttttcgaaataacacttaagacaataccatcacttggtgttttgatttgtaaatccacaccaccaataatttgattgacgaccccttgtgtcatatcaacggactgaatacgttttatatttaattctttacgctttttattaaaaatacctgttgttaaaatgaaataattatcctcaatccaatatcgcgtgttcataattccgacaatttgagaaatgtatgatattaaaaagaatacaaatacaatacctatccataaatatgattcgggattcgtataatcaaaatctttcaattgaaagataatgaaaataaaaaagacgactatgttttgtttgatagcattgattatgccattaaaatatgaaatcggatgtaatttttgaggttcagacatcactttcaacccctctcaaattcgacatagttctctcttcgattattttaacatcgtcatgagacatcatcggtaaataaatagtatgacctgcagtcataaatccaactttatacaaattaagcactttactaattggattagatttaatcgacaagtattgtaaacgttcaattcgactcgtttcttctttatatataaaaaatgatgtacgatattgtacacttagttgatcaactttataaaagcgacaatgatattgccataaaggcttaataaataattttaatgtactcagagcacctaaaaccaacaaaatataaagtaagtaatgtggccattcaaatcttaaccatataaaataaaaaatgacatacacagctacactcaatataaattctaagccattcgtaatgtagtaatacaacaatgctgacttaggactcttagtcaacttagtataatctgacatatacccctctccccaaataaaaaattatacggatttataatctatttcattttatttttatatgatgataattatagcatatggaatatttcatgctaatttattcttcctaaaggtacatctaaaaatttaattaagcagaaagtgcttgaattgctaaaaagacaccatgtataattttatcaacatgatgcctttcatctataatcaatctttcatcttatcaagagcgatatttagttcaagcacattcacataatcatttgttaacacaccacgctgcttacgatgttgaatcaagtcggccactcttgaagtagatacatgacgagcatcagcaatacgaggtgcttgcttcaatgcattttcgaccgtaatatgcggatctaagcccgacccagaacttgttgcagcatctattgttacatttgaattcccaaatttaacatgatgtttcatgcgtgctattaattcggtgtttccattcgattcattacttccacctgaagatacgccgtttttatataatttttcaggattcatattataatcaactgcactcggtctcccgtgaaaatatcgtgtctctgtccagtgctgtccaatcaattttgatccaactatacgattgtcatacgtaattaaactgccatttgcttgttgataaaaaaatatttgaccaattaacgtgatagctaacgggaataaaaatccacataataccatagttattatcgttaaacaaatactatttcttatcgtattcatggtacaggctccttcctctttacacaaaaaattgtacaatcatatctattaatttaatgcctaaaaacgggacgattaatccacctaatccataaatcaacatattatttataaagattctatcaatgctgtaaccctttacttttacacctttcatggcaattggaattaaggcaacaatgattaatgcattgaatatcaaagctgatataattgcagatttaggtgacgataaatgcataatatttagtgaagtcatttctggaattgttgacatcattagtgcaggtaaaattgcaaagtattttgctacgtcattagccaaactaaatgtcgttaatgcacctctcgtcattaataattgtttgcctatttttacaacctctattaactttgtaggattcgaatctaaatcaattagattagctgcctctttagcactaattgtccctgagttcatagctaatcctatattcgcttgtgctagcgcaggtgcatcatttgtaccatctcctgtcatcgcaacaatatggcctttcgcttgttcatctttgatgactttaattttatcttcgggtttacactctgcaacaaatctatcaaccccggcttcttttgcaattgtagctgctgttaaagcattatcacctgtacacataactgtttcaatccccatttttctcaattcagtaaatcgttctacaagaccatctttaatcacatcttttaaataaatcacgccaagcatgacattgttttcaatgactattaatggtgtgccacctttactcgatacatccatacagagagactcaatattaagaggaatattgccttgttgttgtttgacaagatttatcatactattaggtgcacctttgaataccgatatttcatttgtaatgattccgctcattctagtttcagctgtaaaaggcttatatgtgccatcaatgtctttaggcagctcatttatatacatctgcttcgctaatcgtacaatactttttccttctggcgtatcatcgtagattgatgacatataagcagcgactatcaatttttcaagcatttgttgattcactggtaaaaattcactagcgattcgattgccataagtgattgtgcctgtcttgtctaaaatcattacatcgacatctccacatacttctacagcacgcccacttttcgctaatacattgaattgagtaacacgatccatgcctgcaataccaatcgccgataacaaaccaccgattgtcgttggtattaaacatactgttaacgcaatgagcatcgcaataggtaaaattaaatgcaggtaagatgctattggatataacgttacaataacgactaaaaatataattgttaacgttgttaataatgtaaaaagtgcaatttcatttggtgttttatttctttccgccccttcaactaaggcaatcattttatctaaaaaagatgtacccgcttcactctcaacacgtatttctaaccaatcagatgttacaagtgtaccgccaatgactccatcaaaatcgccacctgattcttttatcacaggtgcagactcaccagtaattgcagattcatcaacggttgctaatccatttattacaacgccatcagcagggattgtttctccattttctacccgaatattttgtccggcttttaactctgtggcgttcactatccgatacgcaccattttcttctatcaatcgagcagttaaatttgattgtgcttgtcttaaactatcagcttgcgcttttccacgaccttcagcaaaggcttctgaaaaattagcaaacaatatagttattaataatatgataaaaattgtaatcaaataacctcgcgatagatagctagttccaaatatgtcaggaaaacatattaatatcaacgttaaaatcattccaacctcaacgacaaacattatcggattttttattaattgtttaagattcagcttataaaaactcattttcaaagcttctatcaccattgtttgattgaaatatttatttacatgatgcattttttccatccctttactttattttaaagttaaaaattcaccaataggaccaagtaatagtactggaataaatgtcaaaccacttagtaaaacgataaatacgattagtgatacgccaaaataaggtttatcaatcgctattgtatatttatcttgatggtatgattttttattcactaaacttgatgcaatcattaattgcaaaataattggtatataacgagaaagcaacataatgattcctgtagagatattccagaatgttgtatcatctttcagtccttcaaaccctgatccattgttcgcagcagctgatgtcatttcatacataacttgtgaaataccatgaaaagacggattcgttatactttcacttgctccaggaatcataaaagcaagtgctgaaaatactaaaattaaaattgggtgtatgagaaagactaagacaatacatttcatttcacgggcgccaattggcatatttaaatattctggtgttttaccaaccatcaaactgcatataaacaccgtcagtaagacaaatatcaataaattcatgagtcctacgccttcgccaccaaatacaacatttagcatcattaataccattggtcctaatccacctataggcgttaagctatcatgcatgttattaacagaacccgttgtaaatgccgtcgtaataactgtaaatagtgctgacaaacctgctccaaaccgtacctctttaccttccatattcggtccataaatgcctaaattcgctagtattggattaccacgatactcactccacatagttaatgtaagaattgctataaaaatgaaaaacattgcgacaaataatatcaacgcatgacgatgtactcgtttaccatgtctacttaacatgcgaccaaataagaacaacattgacataggaagtaacatcatactgcccatttctataaaattgctccaaatatttggattttcaaaaggtgttgcagaatttcctgctaaaaatcctccaccattcgtaccaagatgttttattgattcaagtgatgcaataggtccaaatgcaatatgttgaatatgtccgcttaaagtccgaatcattaaattagcatgcaacgtttgtggtacaccttgagtcatcaataaaatactaattaaacatgataatggtaaaagtactcggacaataaaccgaacaatatcttgataaaaattaccaatgatattagttaatccagttaaacgtctcaacatcgctatacaaacggcgtaacctgatgcactagatgtaaacattaaatatgtcattacaatcatttgcgttaaatatgtcacatctgattcaccgttatagtgttgtaaattactatttgttaaaaaagatattgctgtattaaacgctaaatctatcgattggtttaaattatgatttggatttaaaaaaagccattgctgaactattagcaatacaaatgttataaaccccataaatccattaaatgccagaaaatgtttgacatatgttttagctgacatgtgttctaaatctgtgccgataattttaaaacacatattttcaaatctagtaaatattaaatctactcttgacgattgcaccaatgctacgcgatatagatatccactaaaaacatacgtaatcataaccatcattgttagaaacaaaattatttccatgataaccctcacttaatatatttctaaaatttttcactacgaattaaggcataaaataaatacaaaactaatgcaataactaccagtaataaaacgatgagcattgccataacctccttacaacacaacaacatcgtaacaacttgtttatgagagaaatattaattttcaaacttagttattaagaaatcattaagatgtgtatgcagaaataaattttatagcatttaattgtgaagaatattatgatattgctatcgaggtgaaggttatgtcaaacactgaatcgctaaacataggaaaaaagcgtggatctttaacaatttacatcggttacagtccaggtgttggtaaaacatttgagatgctttcaaatgccattgaactatttcaaagtaacgttgatattaaaataggatatattgaaccgcatcagcgtgatgaaacaaatgcattagctgaacaattacctaaaatcacaaccaattttactaaacatggtagtcatcattttcaatatttagatgtcgaccgcataatcgaagaatcgccgacaatagtacttatcgatgagttagcacatacgaatatttctagagatcgtcatgagaaacgatatatggatattgaagaaattttaaatcatggtatcgatgttcataccactttgaacattcaacatattgaaagtttaagtagtcaaattgaactgatgaccggtgtacatgttaaagaacgtgtacccgactatttcataatgagcgccgatgtattagaagtcgtagatatctcacctgaacaattaattaaacgcttaaaagctggcaaggtatataaaaaggataggctagatgtagcatttagtaatttctttacgtatgcccacctaagcgaactgcgtacattgacgttaagaacagttgccgacttgatgagtgataaagaaaaagtccgacacaaccataaaacatcactcaaacctcatattgctgtggcaattagtgggagcatttataatgaagcagtaattaaagaggcattccatattgctcaaaaagaacatgcgaagttcactgctatttatatagatgtattcgaaaaaaacaggcaatataaagatagtcaaaagcaagtgcatcaacatctcatgcttgcaaaatcattaggagcaaaagtaaaagtagtttatagccaaaccgttgcattaggattagacgaatggtgtaaaaatcaagatgtaaccaaattaattatcggacaacatattagaaataagtggcgagactttttcaatacacctttaattgaccatttaatgtcctttgaacatagctataaaatcgaaatcgttccaatcaaacaaatacctgttgaattgaaaatgaacaaatcaccctatcgtcctaaaggcaaacgtttcgccatagatatgttaaaaatgattttgattcaaataatttgtgtaatgatgggactgtggatttatcaacttgataagcatgagtctagtacgattattttaatgatttttctcatcggcatcattttattatccatttggacgcggtccttcatcattggctttttagcagcaattattaacgtatttgtttttaattatttttttacggaacctagatatacatttgaagtatatcgctttgactatcctattacatttatcgttagcattttaacaagtattttaacgagtgctttattaaaacaaattaaattccaatactccattactaaaaagcaactttatcgtacagatttattatttcaatttaatgattcgattaaacaaacttatacagttgaaaacttactaataaatgctggataccaaattaatcaattattgcaacaatcaattactatatacgttatcaatcaatcgaaagtaattaaaacaataccattgcaaaaccatatcgataatacgactcaacagcatgaacaagcattaagctgggtaattaaaaatgaaagacaagctggtgcaacaacagatacatttccaggcattaataaatggttgataccaattggcacatctccgattaaaggcattctagccattgattaccaaagttctcaagtgattaatccatatgatgcatcaatattagaatcaatgttaaatgaactttctctcgccgttgaaaatgtgacgttacttaaacaaacgagagaatccatgttacaggctgaacgtcaactgacacattcaaattttttaagatcaatttcgcatgacatacgtacaccgttaacaacaattatgggaaatttagatattttagtatcacatagtaaagatatgtctatcatagaaaaggaacaattacttgtacatagttttcaagaaagtcagtatttatatctattagtgacaaatattttatcattaacaaaattacagtcatcaaatgttcagataaaattgcaaccttatctcgttagtgaattagtagaagaaatcgatatgattttagaacgtcgccatttaaaaaagcgtataactgtatcatcctcagtaaatttacagtttatacacattgacagtaagttgattttacaagctttattcaatttgattgaaaatgcagttaaacacacttctactgacaccaaaatcaatttatctattcgttatgctagctatgaacaaatcgaatttgccgttatagacgaaggacctggaattagtttagaagaacaacaaaagatattcgagcctttttacacaggatcaaataaatattttaaagataaccaaaaagaaagcatgggactaggcttatatttagtacagactatcctacacaaacatcaatcaaacttacaatataaaccgaaccaaccacacggcagtatattctatttcaatatatatacagactttaacgaaggagacgtataatgcaatctaaaatattgataattgaagatgatcacgcaatcacacatttacttgatgttgcattaactttagattattacaatgtaactacagccgacaatgccacacaagcacactttaaaattcaaattgataaaccagatgtcattttattagatttaggtttaccagataaagatggattatgtttgatttcagaaatcaggcaacatactgacattcctatcattgtaataagtgcaagacaagaagaacaaacaattattcaagctttagataacggtgcgaatgactatatgactaaaccttttaatgttgatgagcttcgggcacgaatacgagtcatcgagagaatcgctaagtcacatcaagaaactaacattgtatttactaacggtttgctaagcatcgactttggctccaaatctgttgttattaataatcaggaggtacatttgacgccaaatgaatttagcttgttagaactattgtcaaatcataaaggaaaagtactcacttatgagatgatattaaaacgaatatatggctatgttaataagactgaaatgcctagtttaagagtgcatatgacatcattaagacaaaaactttcacaatgtcatgaggacgcaaaagatattattaaaacacatccacgcattggttatcaaatgttgcagtggaaagagaaataattaaataaaaaagatcgctgccattaaacgaatgattggcagtgatcttttttatattcaacttattatttatcgcgcactagcgtcagcaaaaagccctattgttttttataagaacatgatactgaaatttcataaagtttatttatgttcgattattcttaatttaaaaatagttctttaaattatatactcaccacatttggtggagaaccatatttacacagaatgatataaccgcatacagatctcaatccaattaaatatttaacctttaaaacgttagtactttgatatctacagagaatcaattattgaaaacaaaaaagagctcaagacattacatctttaagctcttaatctataaattatttttgatggtcagcaaatgtgcgacctttcataggtctgcttccaccgctgctcttctctttacggtcgaatttttttgtacttttcttcttacttgagtatccttttgaacgtttactcttactgtcaaatttaggattaccacgcttactatttctgttacgagaaccacttggtttaccgttacggcctttgcgagataatggtttttcaaaagttaattgaacttcaacttcatcgtttgcttctactaactcttgtaaaagtgcagcaactaaatcaacatcgttatattcatttaacaactctgtagaaatgcgtttcaagcgtgattctgactctttagacatccagttttcaactttttctttgatgtcatcttcacgtgcttgaagtacttctttacgatgtggtggacgaagtgcactcatttttctaccgtttgcatcttcaatttgtctgatataatccatttcgattggattaacaaacgttacagcgataccttctttaccagcacgacccgtacgaccaatacggtgtgtatagctttcagtatcttgaggtatatcaaagttataaacatgactcacaccagaaatatctagtcctcttgctgctacatcagtagcgactaaaatattaatttggtcatttttaaatttctttaatacttctaaacgtttcgcttgtgtaatatcaccatgtaaaccttcagctttatatcctttagaaatcaaagcacttgttaattcatcaacacgacgttttgtacgtccgaatacgattgctaattcaggttgatgaacatctaggaaatttgtaaatgtatcaaatttctctaattctttaacaattgtatagaattcttcgatttgtggatcagacatttcattattcattgtcttaatgatttttggtgatttcataaattgttgtactaaagcttggattgccttaggcattgtagctgagaacaacattgtttgacgttgtactgctggaattttatccataataaatctcatatcatcgatgaatcccatattcatcatttcatcagcttcatctaaaatcaaagtatgaattccgtccgtttttaatgtgcgacgatttaaatggtcgataacacgcccaggtgttccgactacgatttgtgggccttttttcaaggctttaatttggcgttcgataggcataccaccgaatacagtaacaacttggacaccttgtccacggctaaattctcttaattgttcagctacctgcattgccaattctcttgtaggtgctaaaatcaacgattgaaccccttgtttccctactactttctcaattaaaggaataccgaatgctcctgttttacctgtaccggtttgagcttgcccaaggatatcaattccttgtaacgcataagggatactgtctttttggataggtgtcggctctttaaatcccattgattcaagtgactgaaccgtattatccgaaatccctagttctttaaaattttgcaaaataattctcctttttacctgtttatttctcaatatacttttgcatataagttcattaatatttcatcaacttctatatagtaccaccaaaaaaatttaatcgcaataaagcaatttgcgaatatttattagaatcacattaattgattgtcatatttttgtcaaaaagctagcattagataagatgtaagcgttacgcatcattcgaataatcattataaaaaattttttataaaatacgtatatcgttaacattccacaacaaattttactgaaacacatgtgaaattagacattataatactacatctttttgtaaaacattatataaacattcaaactacttcctatataaagtgtgtacatagaattaaccttgatttagtttcaaatttatagatttaacataaaaagaaaaaggcaattttgtatttacacacaaaaccacctcttctttgtaatcttttagtattaattcaaatcatttttataagtaaaaggtccctcgactaatctctatgaaattaaagcatttaccacttcttctaatttcataccacgtgatcctttaactaatacacggtcatgcgcttttaaatcgtttattaaaacttctatcatatcgtctttagaattgaagtgttgtgctttttcgacatgttgctggcccgaatcataaatatacttcgcttcattaccaaacgtatacaacacatctatatgcttttcttctaaataattacctacaccgatatgcatttctttgctattttcacctaattctaaaacatctcctaaaattagaatgcgacgccctgtcaaagtactcagtgtatcaatagctgctctcatacttgtaggacttgcattataggcatcatttatcacagtaatatcattttctaatgtatgttgttccatacgcataccagttaagctgacattttttaaattttgatagattgtgttatatatcaaacctaattcatgaccaaccgcaatggcaatcgtcgcatttttcatattatgctttcctaatattggcagatcgtaatgttctttattattaatcgtaaatgaaatacctgtagtatctctatcatcaacagaacaaactaatgcattatcagtagcaacaccaatactaatacattttgcattttcaacttctttaacatgtggtttcaataatggttcatcgccatcatatataaacgtaccattatcttttagacctattgtaatttcagatttagctttagcaatcccctcgcgcgaacctaaatcttgcatatgtgactcaccaatattagttataactgcaatatctggttgagcgaggtttgacagaaattcaatttcatggaaacctgacatccccatctccaatattgatatttcagtatcattatctaattccaaaatagttaaaggtaaaccaatttcattattgtaattaccttgcgttttcttaactttaaattcggtatgcaatacactttcaatcatatctttagtcgttgttttaccattagaccctgtgacggcaattactttagggtttacatgtctcaagtaagcttgtgccaattgttgtaatgccgttaatgtgtcttcaacccatataataggcccgcttacattttcatctataggtgtccctctttgataaaaagcagccccagcaccatcttgtaatgctttagagacaaagcgatgaccgtcaacattttcacctttaaatggtataaataacatatttttagaaattgctcgtgaatcaattgtgactccatttatctcttgatttaaaaattgatcttcaatttcacaaggaatccatgattgaatttgctttaatgtaacattaatcataataacaacctcagttagtcaattttgtatttatttttctgtttatcctggtgacgttctttagcaagctcgataagttttgtaatcaattctggataagataagcccatattttcccataactttggatacatactgaaagccgtaaatccaggcattgcatttgtttcattaatatatatttggttgtcttctgttacaaagaaatcagcacggactaaaccagaacaatctgtcgctttgaatgcctctaatgccatatttctaagcgttaattgaacatcttcgtctaagtcagctggaatttgtaattgaaccttaccatctttatattttgatttgtaatcgtaaaacgcgacatcttttacgacttcacctggccatgtcgcttcaggatagtcatttcctaaaactgctacttcaatttcacgtgcgttaacgccttgttctataacaagcttacggtcaaattggaatgcttctttaataccttctttaagttccgcttcattattacatttactgatacctacacttgaccctaagttagcaggtttaacaaagactgggtaatttaatttatcatttactaattttaaaatgttatgttcatatttttcatattcagaacgtaagaaactaatataaggtaactgtggtaaccctcgatgttcaaataattgtttcattacaagtttgtccatagaacttgcagctgacaatacaccatttcctacatatggtacatccaaaacttcaaaaagcccttgaatcgtgccatcttcaccattaggaccatgtaataatgggaatactgcatcgtatggttgtcctgaactactttctttcaatagctgtgaaatctcaagcgcctctccattttctaaatgaagctcatcagtagatttaatttcagctgtaatattattttgctttctccaatcaccatcattggtaatataaatgatatcaacatgatatttgtctttatctattgcatttaatacattttgtgctgtcagaatcgatacttcgtgttctgcacttttccctccaaaaacgatacaaatattttcttttgtcatttcgttttcctccaatgatatatcagggtttgctaccttaatataaattaatattgatttagtcctattgttaattgatttattcgcatctttgaatcttaatagtatcacattttaatgctattttgcattttaaaaacgaggacttatgtgtctgtatctatgttgattcatttataatcagaacaatattcccttctattttattcctaattcaaattgaaatctatagctgatatcactgtgatattctagctaatttttaaaaagtcatgtaaaattgatataaacattagtgagtataaaaggagtttgcaatgaattattcatctcgtcaacagccggataagcattggcttcgcaaagtagactgggtattagtagccactatagctgttttagcaattttcagtgttctgcttattaactcggcaatgggcggtggtcaatacagtgctaatttcggtatcagacaaattttttattacattttaggtgcaatttttgcaggtatcatcatgtttatttcacctaaaaagattaaacattatacatatttattgtatttcttaatctgtctattattaataggcttgctcgttattcctgagtcacctattacacctattatcaatggtgccaaaagttggtacacgtttggccctatcagtattcagccatctgaattcatgaaaattattttaattttagcattagcgcgtgtcgtttctagacataatcaattcacattcaataaatcattccaaagtgatttgttattatttttcaaaattattggtgtctcgttagtaccaagtattttaatattactgcaaaatgacctaggaactacattagtattagctgctattattgcaggtgtgatgttagtaagtggtataacatggcgtatcttagcacctatctttattacaggtattgttggtgcaatgacagtcattttaggtattctatatgcacccgcattaattgaaaatttattaggtgtccaactgtatcaaatgggacgaatcaattcatggcttgacccctatacatatagtagtggtgatggctatcatttaactgaatcacttaaagctatcggttctggacagttactaggtaaaggatacaatcacggtgaagtttatatacctgaaaatcatactgactttatcttttcagtgattggagaggaacttggctttatcggttctgtcatattgatcttaatatttttatttttaatcttccatctaataagattagctgcgaaaattgaagatcaatttaacaaaatctttatcgttggtttcgtcactttacttgtgttccatattttacaaaatattggtatgacaattcagttgttaccaatcactggtattccattaccatttattagttatggtggtagtgcgctatggagtatgatgactggaataggtatagtcttatcaatttattatcatgaaccaaaacgatatgtcgatttataccatccaaaaagtaattaatttaaactattttgagtttcaaatatcataacttttcaagatgacgttatatagtctatttacgtcgtcgatttaaaatgtcatatatagatattactcgataataacaatccctctttgaagtacacattgtaaaatgtacactctaaagagggattttgttatatagtacttgctttcattttagtaaatccagtcaaaaaagctatcatcgaatagtccgacgatagctttaacggtgtgtgattcacaatcacagtcaattattttaattcgtgacttactttattagatgctggcaaagtattaataatgtctaaacgagatttagtttttttaatattcacacctaatgatgacaatagtttgactacattttgaatcttttcaggacgtttcattattatcacctcgtttggatcgctttcaatattatcttaccctattcgacatacctttactacatcatttacaaaatttttaatttattttcaaaattaaaatctatagcgcactctacattataccctaaaatacaattttgtatccttcatcatagatttctttttcaatactattcaaatttgctggtgtctcatacgatacagttacttgaccatctattatattaatattcacttgatgaacacctatcatatttgaaatgcgttctgtcaattgacttacttgttcttctgtttcaattcccgctgtgtaaatcgtattttgatgtatcatcttaaactcctttagtctttaatcaatttttgaaaagtcactaataactcttccattgcctcttcctgagcaccttgattaactttattcataatacaacttttcatatgttgttctaataactttatcgcaacactgtttaacgccgaacgtgtcgctcttatttgcgtaaggacatcatcacaatagacatcttcttcaatcatgcgattaatcgctctcacttgtccttcaattcgatttaaacgtgatttaagattcgtttttatttgttcagaatgatgtgcattatcttgttcagtcatagcattcactccttcatttacattccttactatactatatcccataaaacacaacgtcaacacaaagtgtgtttttcaaactaaattgtcatgatatttaaattgcttcatgatacaattaataagatatactactcgtttaagattttcgatgggaggtttcaaatgatagagttattatccattgcactcaagcattctaatattattttaaattcaatatttattggtgcatttattttaaacttattattcgcctttaccattattttcatggaaagacgttctgccaattctatctgggcttggttactagtcttagttttcttgcctttattcggcttcattttatacttactattaggacgacaaattcaacgtgaccaaattttcaaaattgataaggaagataaaaaaggattagagttaatcgttgatgagcaattagctgctttaaaaaatgaaaacttttcaaattccaattatcaaattgtaaaatttaaagaaatgattcaaatgttgttatataataacgcagcatttttaacaacagacaacgatttaaaaatatacacagacggccaagaaaaatttgatgacctaatacaagacatccgtaatgctactgattatattcattttcagtactatattattcaaaatgatgaattaggtcgtaccattttaaatgaacttggtaaaaaagcggaacaaggtgtagaagttaaaattctttatgatgacatgggttctcgtggactgcgtaaaaaaggcttacgcccgtttcgcaataaaggtggacatgctgaagcatttttcccatcaaaattacctttaattaacttgcgtatgaacaatcgaaaccatcgaaaaattgttgtaatagatgggcaaattggatatgttggtggttttaatgttggtgatgagtacttaggtaaatcaaaaaaattcggctattggcgagatacgcatttacgaattgtcggggatgcagtgaatgcattgcaattacgatttattctagattggaattcacaagccacacgtgaccacatctcctatgatgatcgttatttcccagatgtaaattctggtggaacaattggcgttcaaatagcttctagtggtcctgacgaagaatgggaacagattaaatacggctatttgaaaatgatttcatctgctaaaaaatcgatttatattcaatctccctatttcatacctgatcaagcctttttagattctattaaaattgcggcattaggtggtgttgatgtcaatatcatgattcctaataaacctgaccatccgtttgttttttgggctactttaaaaaatgcagcatccttattagatgccggtgttaaagtatttcactacgacaatggctttttacactcaaaaacacttgttatagatgatgaaattgcaagtgtgggaacagctaatatggaccatcgcagtttcacattgaatttcgaagtcaacgcttttatttatgaccaacaaattgccaaaaaattaaaacaagcttttatagatgatttagcagtatcttctgaattaacaaaagcacgttatgctaagcgaagtctttggattaaatttaaagaaggtatttcacaattattgtcacctatcttataaaatagaaatatgaggagtgtaactttaatgcaacaatcagacgtcattagtgctgccaaaaaatatatggaatctattcatcaaaatgattatacaggccatgatattgcgcatgtatatcgtgtcactgctttagctaaatcaatcgctgaaaatgaaggtgttaatgatactttagtcattgaactcgcatgtttgcttcatgataccgttgacgaaaaagttgtagatgctaacaaacaatatgttgaattgaagtcatttttatcttctttatcactatcaaccgaagatcaagagcacattttatttattattaataatatgagctatcgcaatggcaaaaatgatcatgtcactttatctttagaaggtcaaattgtcagggatgcagatcgtcttgatgctataggcgctataggtgttgcacgaacatttcaatttgcaggacactttggtgaacctatgtggacagaacatatgtcactagataagattaatgatgatttagttgaacagttgccaccatctgcaattaaacatttctttgaaaaattacttaagttagaatctttaatgcatacagatacggcgaagatgattgctaaagaacgtcacgactttatgatgatgtacttgaaacagttttttacggaatggaattgtcacgactagacattgaagttgtagtatgatgatgcgatgtaatggcgtgttgttgtggaagcttggtgtcatgccatgttactttgatgtgttgttgtgggagcttggtgacatgtcatgctactttgatgtgctggtaccacgatgcgtcttgatgtagtgctatgatgtggcattgcggtgttatggtgttatagacaggtttggcgttgatgccatgttactttgatgtgctggtaccacgatgcgacttgatgtagtgctatgatgtggcattgcggtgttatggtgttatagaccggtttgatgttgatgccatgttactttgatgtgctggtgctacgatgcgacttgatgtagtgctatgatgtggcgttgcgctgttatggtgttatagccaggtttggtgttgatgtcatgccgttacgattctatgatatgttgttgggacgttgcaatgtgtattatgccgttgtgacgttattatttcacactgttacatgtataagtgaattgctgtggaaatttgcgacatatactgctacactgatgaatcattgtgtcaagatgacattgcgatgaagaatgacaactctgttattaaccactttttacatactgaaaactcgttaatattatttcaaataaaaacagcagtaggatgactttcacatttgaaatcatcttactgctgtttctatttatcacatattgtataatgtgacactaagtttcgctattgaagcgaaaaataatgtgcgccctataaagttaaaattatcttcaacttttagggtgcacattatttggacttgctaaggttatttctttttctttttagacacaacttgtgtgtttttgacttttttattgctgccgccgttgtgctctctttcatacgcttcaatgaaaggttgtacttcttttttagcgactttttcataataaatgttcgcaaagtgtgtttgaactacaaggaacgccgcactgactgaccagtacaaaccaagtgctgatgctgagcttaatgaaatccagataatcataattggtgaaatgaccatcatcatgtaacccatttgacgttgttcgtctggcatcgttttacttgatacatatgcttggataaagtataaaacaccggcaataattgtaatccaaatatcaggacgtcctaaatcgaaccataagaagtgtggatatttaaacaaaccatctacaagttggtctttaagtacaaagtataatcccatgatgattggtaattggattagcattggtaaacaacccaacatactcttaatcgggttcatgtcatactttttatatacttgcattaattcttggtttgcagccattttttcttcttgtgtacgcgcacgtttcactttttcttgaattttttcaacttctggctttgcaactttcattttttgacgcatcatatgactatttttatagtttgacaacatgaatggtaataaaataatacgaattaccaatacaaggataataatagctaaaccataattgtcgtttaataagttatttcccaaccaatccaatacatttttcattggatctacgaatgtattgtagaaaaacccactacgtttttcaggtttagaatagtcacaaccagccaaaaagaccataatacctaaaaataatggtagtaacgcttttttcttcatttttccacctctatcattatattcacataggatttattctatcacattaatgagtacgtatgaaacaataagtggaaaaatttaactaattattaaaaaaatctttgaatcgattaacagtcttttcaatattttcacttttagaaatggctgaaatgactgaaattccattggcacctgcttctacaatcggcgccacattattagtattgataccgccaatagctacaatcggtagttgcggattcatttctttaaacgttgcaatcatttctggacctactggtatatgcgcgtcatgcttcgacggcgtaggatagattggtccaacacctatataatcaacatgagttaaatcagattttgcatactcatctaaatcactaatactaagtccaataattttatcagtgaaatattgtgctatctctttgactttcgcatcatcttgaccgacatgtataccatccgcgttaatttcttttgccaaggatacatcatcattaacgataaaaggcacatcatattgatgacagagatgctgtaattctttagctaatacaagtttatcgtttccttttaaagctgattcacccttttctcgaaattggaaaagtgtaatccctgcctttaatgctgcttctaatacttcatgaatagttcgatgactcggaacatcggaggtcccacaaataaaatacacatttagatacgattggttaaacatattattccacctcttgaatacgaatccgttgttgataggttgtttcatttaaatgatataacgtatcaagcaacaatggtgaaaacgtaccaggaccaccacaattttcattttcagcagctacctcagcagcaatattaaatacgcttaccgcttcaattaacgcttctatgtctggttctgtttctctaaataaaaatccagcaataacgcctcctaataaacaaccagctccagttactcgtgctaataatggagatccattagctaatacgaaggctttattatcttgaacaataacgtcctctttacctgtgattactattgcagttttatatgttgcgtaagcctttttcgctattgcaaccgcatcaagattagcatcactatctgtacctttcatagttgctgtatcatcaatcaacgctaatatttcagatgcattgcctttaattactgatactttcgctgatttcaataataatttacaaaattgctttcgatatgtagaagcaccaacagctacagggtcaaatacaataggtaagcctgcctcatttgccgtttgagcaatcgcaataatatcttgttcattttctgctgttaaagtaccgatattgattaatagcgcttgtgcaactttgtaaaattcttcagcttcttcgggagcttcactcattgcagggctagcaccaatacttaataaaccattcgctgtaaaatttttaactacatcgtttgtataacaaattgttaatgggttttcaatacgtattttatttagataattcatcgtctaatccctctttctttaaatatgcaaaatgattcactggacctctaccacggccgatttcaggcgtatattgtatactcattgaaataaactttttagccttgtgtacagcctcaaataatggtctaccttttgcaagttctgccgttataactgctgaaaatgtacaccctgttccatgcgtatgttttgttttaaatcgttcattttcaaatgtttgaacaccttcgttagtaaataaataatcttttgctatatcagtatcatttgaatgaccgcctttaatgatgacacctttactaccaatctcattaataaagatgcggccagcctgcataattttttcttcactatcaatggttagtcccgttatttcttcagcttctggtaaattcggtgttactacgtcagctaatggcaataacgtatgctgcaagttttgctttgtgtcattatccattaatgaatcaccgcttttcgccaacataacaggatcaattacatatggaatagattcatgttgcattaaataatgacgaatcgtttccatagtatctgctgtagcaatcatccccgttttaatagcatgaggtaaggtatcattgaagacactatcaagttgttcatctacccattgatgatttaaattatgaatatgttgtacgcccaatgtattttgagcaacaatacttgtaacgacgcccataccatatacaccacatgaatgaaatgattttaaatcagccattacgccggcaccacctgttggatcagtacctgcaatggttaatgctattttaggtttaatcatttacttttcctccaaattcccattgttctagtgtcatagccatattgaaaaatcgacgctcatgtatgcaactttctaaaaatacttgctttacttgttccaattccttgtcagacattgattcggctaatttattcattaatgcctcaaatacgttaattatgtcatccatttcagtactataaaaatcaaaccattttgccgtatctttttctctattaagcttatgatcactttgagagcgcttagctaattctgcataaatatatggacaaggtgccattgcagcaattgtataaatagcattttcacgactatgcgcttggaaatacatatgttttatgtaatggtcgccacttggaggccaaacttttgttttaatgatttcttcgtatgattcaccaacaatttgcgctaaaatatcatgcgcaagtacttcaccttcaaccataaattctatttgctctactaaaaattttacgtcattcatgctattcatttttggaattaacaaagcatataagtttgtaaattcttttaaatacgcagcatcagcttttaagtaatggcgtaatgcgtcagctcctatatctccggataacatcttctgaataaagtcatcctcataaatatcattaatgattggctttgcagcttggtacaatttttgtgaaaattccattgtaaaaaatcctccctaaataaaaaaactacttccaacatgaaagtagtttgatggcaatgttgctatactagccccatcacttcaataactactttcctacgttggtactaaccaaatcaggtcataagggtctgaacaattcatctcagccatatcattaggctcccctagtagttccttagtattcaattgcaaattaatcttagcaaacggtttcaacattttcaattattgttgctcagttgtattattatctttaaataataattctataatgacatatatttgcgaaataaaaaaaccggaacatatcgagaattccccgatatattccaatctaaaagttacttatataactattaattagctatgcataaatggcttatgcagtaacccaatgtccagcgccaccagtgttatataattttactgctgcggcatcttgaacactttcaggagcatttgctggtgatacacctttatatttagcaggtgctactgaatcccaagttgattgtaagaattgatacttaccagctgcacctgatgttggatttacagcatgaatattgccacctgattcacgttgagcaatttgttttagatgagcattcacatttactgatgaaccttctgatgattttgattcagttggtgttgcagtaacttgtgaattgtttgatgttgatgcttgtggttgttgagtttgagcattttgtggtgcttcaacttcttgtgattgtacttgattagcttgaacagctgatggtgcaacattattagttgcaggtgcttgtgcactcatgtctgctccattagtacctgttgcatggtaattccaagcaaagtgtgtaccatctgattcaaagtgataagtaaacccttcatagtcaaatgtataattataagccccagcttcaattggtttttgatttaatgtttgatcatttgattgcgccatttgcgctaaagatgctttatttaagtccgcttcacttgcatgggcttcgtgacctgcatttcctgctacgattcctaaacctactgctaatgatgatgcgagtaatgttttcttcataatcttaaaatcctcctacaagtaatttgtttctctaaaagttttacagagactactgtaacatctataaaatccgtgcaggttacaacaaaataaaaaaatagccttgttttttacacagtgattacaacgaaatcccccataatttcagatatgattctatcgagaattgtcatgacagtaaaaatgttttttatttgcaattttttatgtaatcgttttgcaatctatgtctattttctattagaaaaactacacaaaaagacgacctacacaacagtactagtcatgtaagtcgtttttaagtgagtatatttcaagttaattagatctataaaaaatttaggatggattaaatgtatattaaggatgtttaggataattggatttaaatttctaataagtcatgattatctatattttgagagtcaatatctaaaatactatctgagagaatttcattattttgggatttaggggacataaattttattgtttcaacatataattcagtgacaaagtgtgtttgtccgtctttatcatactttcttgatctcatttgaccagttataccaaccaatgtaccttgattagtatatttttctatattagaagctaacttgccaaatgctttacagaataagtaatcacagacgatttctccattttcatctttataatttcggtgcgttgcaacacaaaacattgcaatttttctatcctccttttcaaatatttgtgcgtctttcgtcagtctcccgacaattacgattttatttagcatgtagtgtgtgattcacctcctatgcctatatcttaattactagcttaaaaatggtcaaaatggcaaattttatataattaatagctatagcatctcgttatttgttatatttaaagaaattagtcatgaaatgaccttaaatcttctaaataattcaaaaatcataaatattaaactaatgggatgtgggaatatgaaaacttttaaagcagtaaggtttcaaattgtgaatgaacacggcagaattatagaatatgaattagaagatggcgtaataattaataaagaggaaagtggcacgggttggttgcttgaaattgtcatttctaatgagcattatgaaacatttaaggaatatcaagacaatgaacagttattggatattcgtgtcgtcatcacgcgtccagccaatgatccagctttatttgaatctactgtgaaaagtattaaaaattttaaaacaacaatgtctatcgtatttgaatgtcatatttacactttacgtcaacagtatgctgaaagtttattagaacaacttattgatgatggattatctggtgaagaattaaaaaaatcatttaatcgaatgatgcagtctaaaccaaagttaaaggatgaaaaattagaagagtaaaataaaaaacattcaaagattatgccaacacattaaatctttgaatgtttttttgttttattttacatcttgaattgcaaatgtaagttcacaactacaagcaagttgaccatcgacagtagctttagcattacctttacctattggtcctttaattttagtgatttctacttccaacgttaaagtatcaccaggtactacttgacgtttaaaacgacatttatcaataccagcaaataaagcgattttacctttattttcttcactatttaaaatagctaccgcacctgtttgagctaacgcttcagtaattaatacgcctggcattaccgcatactcaggaaaatgcccttgaaagaatggttcgtttcctgatacttgtttaatagccacacaacgttgaccttcttcatattcaactactttatcaattaataaaaatggctgtctgtgaggtataatttgtttaatttggttataatcaaaaattgtttccatggttgaaatcctccattatattaatttactgaattaatcgttaatacgttcaatgtctgcacctaattgcttcaatttaccgtgtaagtcaacatagcctctatctaggtgcgttaattcagtaacgcttgttttaccatcagcaactaatccagctaaaattaaggcggctgctgctcttaaatcagtcgctttaacttgtgcaccttgcaattgacttttaccttcaagtttagcactacgaccttctacattgatattagcattcatacgtttgaactctgcaacatgcataaaacggttttcaaaaacagtttcggttacgactttatgaccatttgccgttaataacaatgccatcatttgtgattgcatatcagtcgggaatccaggatgtggtagagttttgatgtctacaggttgtaattccccttcagcacgtacacgaataccatcttcttgatagtccaattcaacgcccatttcttctagtttatagactaaactcgccatatgttctttgattgcatcacgtacaaaaatatcaccacgcgttatagcaccagcgattagtaatgtgcctgcttcaattctatctggaatgatagcatgttctacaccatgtaatgattctacaccattgattgtaattgtgtctgtaccagcaccagtaattctaccacccatttcattaatgtagtttgctaaatcgacaatttcaggttctttagctgcattttcaattaaagtcttacccttagctaatgatgctgccataataatattttgtgttgctcctacacttggaaaatctaaatgaattgatgtaccttttaatccatctttagcattagcataaatattaccattttcaagatgaatttctgcgcctaaagcttcaaaacctttaatgtgttgctcaatcggtctacttccaattgcacaaccaccaggcaatgcaacaatagcatgtcctagtcttgctaaaagaggtcccataactaaaatacttgcacgcattttactaacatattcatatggtgcctcttcatttagagtctttgttgcatcaacgacaacagcattttcgtcctttttgtatgtaacgtcagcatttaaagttgttaatacattatttattgtttctacatcacttaaagctggaacattaactaatttgctcggtttatcagaagctaataaagatgctgtcaatattggtaatactgcatttttagcaccttctactttaacttcacccgttaatttatttccacctttgattactattttatccatcgtaaatcctccacttagaactcctattactttacatttccctattttaaaattattttaagtcattatttaattatatctagttttgattacaaatcatagagttagacttattttattaaatattttacctgcgtcgagtattgtaacaaatctacaataaaattgcttactgcagtgcctaataaaatagcaacaaatatcatacacacttgtaattgagtggcgtatccttttttaaaaaattgatctaatctaattgattgtaaagcccaataggcaatacaaatacatacaacatgtaacactaaatggataactgcatattgtccgatataatccattttatcacctcataagattactgtattacattgtacatgaaaaatttaaataatgatacaaagtttaatacccgtttttagtaaagtttaagctaacttactatataattctttttacataaatatcataactataaaatatcttggtatgaaaaaatgtagataatttcaaaaaatgaaatgtcgactgtagatagtggtgaaggaaattttgattttagcaatctattagtgattgtaaaaaagtaaaactattcttgggagtcggacataaatcaatgtctagactctatagtgttgtatttggcagtagttgacggggccccaacataaagaaatactttttctttagaaattagtatttcttatacatgagttttactcatgtattcctatttttaaatacacattagctgtgtttaatgataaagaaccactacatcataaatctttaatggttctttatcaattccttcccccctctcatgttttgtatctttaaatcaatataattcaaaaaagggtcgaagatatgaaatcacatcttcgaccctttatttactattttaattcagccacacgcaaacggttatttgctctctctaaagctctttcggctctatgaatatcagtattgtcgtcatcattttccaagtgagactctgctcttgctttggctaatttagctctttcaacatcaatttctcttgcagtttctgcagtctgaacaatgattgaaactttatcttttctaacttcaacaaagccatcgcttacagcaatatattcagttccatcgtgaaatttcacttttacaaagcctgtttttaaagcagctacagttggaatatgtccactcatgacacctatctcaccagctgttgtttgcataacaacgagttcaacattatcacgattgtaaacagaaccattaggagtgacaatatctaggtttaatgtattcattatccattcctcctaattgttatacttcaacacccatatctttagcttttgcaataacatcatccatgctaccaactaaacggaatgcatcttctggaatatggtcatatttaccatctaagatatctttaaagtttgcaactgttgtcttaacaggtacataagaacctttttgaccagtaaattgttccgctacgtggaagttttgagataagaagaattgaattctacgtgcgcgttcaactgtttgtttatcttcatcagataattcgtccatacctaagatagcaatgatatcttgtaattcacggtatttttgaagtgttgattgtacatcacgagctacttcataatgttcttgacctacaattgatggttccaatgctcttgatgtagacgctaatggatccacggctggataaatacccatttcagttaatttacgttctaagtttgtagttgcatctaaatgggcaaacgctgtcgcaggcgctgggtcagtatagtcatcggcaggtacgaataccgcttgaatagaagtaactgatccttttgttgtagacgtaatacgttcttgtaattgtcccatttcagtagcaagtgttggttggtaacctactgcagaaggcatacgacctaataatgcagatacctcagaaccagcttgtgtaaatctgaaaatgttatcgatgaataataatacgtcttgaccttgttcgtcacggaaatattcagccattgttaaaccagataatgcaacacgcatacgtgcaccaggtggctcattcatttgcccgaataccatggctgttttcttaattacaccactgtcactcatttcgaagtataaatcgttaccttcacgagtacgttcacctacaccggcgaatacagaaataccaccgtgctcttgagcgatgttgttaattaattcttggattaatactgttttacctacaccggcaccaccgaacaatccgattttaccacctttaatataaggtgctagtaaatctactactttaatacctgtttctaaaatttgaacttctgttgaaagttcatcgaatgctggtgcttgacgatggataggatcgcggcgaacagaatcactaatttcttctttaaggtcaattgtttcacctagtacattaaatacacgacctaatgtttcgtcaccaacaggtacactaatttctttgcctgtatcttttacatccatgcctctttggacaccatcagttgaatccatcgcaattgtacgaacaacgtcgtcacctaattgcagcgcaacttctaatgttagttgtattgtaccttcttctttaggcacatcaataaccaaggcgttattaattttaggaacttcgttatgttcaaatcgaacatcaattacaggacccataacttgagttacacggccaattcccatgctattttcctcctttaaatattattcaagcgctgcggaaccaccaacaatttcagtaatttgttgcgtaatttctgcttgtctcgctctgttatattctaatgataagtcatcaataagttcagttgcattatcagtggcatttttcatcgcagtcatacgtgttgcatgctcacttgcttttgcgtctaatattgttccgtaaatcaaactctcaacatattgaggcaagattacacttaagatagattctttatctggctcaaattcataagaagacaaatgaccatgccccttactagaatcctcttgagataatggtaatacttgtctagatgtaggcttgttttcaagaacgctgacataatgactatagtatatatttaattcatcaatttcttcttcactgtataagtctatagcatggttagctagtgcttgaacagatttgaaagaaggttgatcaggtacgtctacttgagaatactcaatgtcataacctctattttttaggaaatcaacaccttgttgccctaaaactacaatactgtattcgctactatcttgatgtttcgcttcaatatcagtaatcaattttttaagcacgtttgcactatatgcacctgctaaacctttatcactcgtgataactaaatatccacttctagtaattttacgaggtcttagcattggatggtttgtattgctacttgcccctgcaactgcagtaattgcatcttgcattttatccatatatggtgtgaattgttttgtatttttttcagctctacgaagttttgaacttgataccatgttcatcgctttcgtaatctgcttcatttttttggttgattttattcgagtatctatttctttaagagaagccactatctcaccaccttatactaaacttgtttattattcagatttgctaaagctttttttgaattcgttaattgctgtgtcaaacttctcagcatctggtaagccaccagtttctctgatttcatttaacagttcagtagcatttgattctgcccagtggtttaactcgtcttcaaaacgtgtgatatctacaactggaatatcatctaaatatccttttgttaatgcataaataatcaacacttggtgttcgactggtaatggtttgttttgatcttgttttaagacttcaacagtacgtttaccacgttctaatttacttgcagtaaattcatcaaggtctgaaccgaattgtgcaaatgattcaagttctctgtatgacgctaagtcaagacgtaacgtaccagcaactttcttcattgctttaatttgtgcagatccaccaacacgagatacagattgtccggcattaatcgctggtcttacacctgagaagaataaatcagattgtaagaagatttgtccatctgtaattgaaataacgtttgttggtacataagctgaaatatcaccagcttgtgtttcgataattggtaatgcagtaattgaaccgccacctaagtcatcgtttaattttgctgctctttctaataatctactatgtaagtagaatacgtcacctgggtatgcttcacgacctggaggtctacgtaataataatgataactcacgataagctgctgcttgtttagttaaatcatcataaacgattaaaacatgtttaccgttaaacatgaattcttcacccattgttacacctgaatatggtgcaatatataataatggagaaggttcagaagctgatgctgctacaacaatagtgtagtctaaagcgcctgcttgtcttaacttttcaacatttgctcttactgttgaatctttttgaccaatagcaacatagatacaaatcgtaccttgatctttttggttcaaaattgtgtcaattgcaattgttgttttacctgtttgacggtcaccgatgattaactcacgttgacctctaccaattggtactaaagcatcaattgctttgatacctgtttgtaatggctcatctactgatttacgatccattacaccagtagcttttttctctactggacgtgttttagttgtgttaatcggtccttgtccatcaataggttgtcctaatggattaacaactcttccgattagttcttcacctactggtacttccatgatacgaccagtacgtttaacttcgtcaccttcagtaatacctgtgtatggtcctaaaataaccacacccacgtttgactcttcaaggttttgggctaaaccaagtacgccgttatggaattctactagctcaccagccataacgtcatttaatccgtgaattaatgcaataccatcaccaatttgtaatacagtacctacatcagttacggacatttctgactcataattttcaatttgtgagcgaagtaatgcactgatttcttcagcttttatggccatctatgtcactcctctttataattaattaactcttctaaattttctttgtaattggacaagatcatttctaacactaccatctaatacagttgtgccgactttaactctaaatccaccaattaaatctggattaatttttgtatctacaataactttagataacttcgtttgttgagttactagtttgacaatcttatctaactcttcttgactcaattcatatgttgactcaattgttgcaaaatcttgattgtagtgtccgttatataagctttggaacgccttgaatacgtcagctattaatgagatatgtctattatctgctaacacgtacatcatatttttaatgtatggattaatgtcagtaaatacaccattaatcaactcacgacgttgttctgctgtttgagttggattactgtcaaccattctcaattgctcaattttatcttttactgcttcatttataactgttaattcttcattaatagtctctaaattatttgtatctaatgacacgtcaaataatgctttagcatacttgttagctacttttaccattatttatcgcctgcctcttttagatacttgtcaaccaatgctttttggtcttgttcagaaatttcttttctaagaactttagaagcaattaacactgatagttcagatacttgattattaatatctgcaatggcacgttctttttggctattgatttcactttgtgctgtttcaatcataccgtttgcacgtacgtttgcttcatgaataatttgttcttgctgttgacgtgcttgaaccttagcatcttctaaaatcttttgaacttcttcttgtgtttctttaagtttttgtttattttcttcttcaagtttctgtgcatttaacttagcttgttctgcgtcatcgatatctctgttaatatctctttcacgtttatccattacatctttcaatggaccccatgcgaactttttaagtaacgcaagtaacacgatgaaagttaggacctgtacaatcacagtaccccactcaacgcctccagctgcaccaagaacgaataagttagctgtttcagtcacgggttcatgacactcctttcattaaaataatcgctagtgttatatagaaaaaaacgacgaggttaggacctactgaatttatgcgataggcatggtgcgttcatatctcaactatttaataaagttcaaagatattactatatatgcatcatgaattatgtcctatgcgctttgtcccgacctcttttatctgttaattatccagcaaatgtcatgaatgcaattactacaccgatgataggtaatgcctcaactaaacctacaccaatgaacatgatacccattaattgaccacgtgcttctggttgacgtgctacaccttcaactgttcttgaaacgattaaaccgttaccgatacctgctcctaatgctgataaaccaattgcgattgctgctgcgattaaattcataatttaatttcctcctgtgattgtatataattattgaaatttttagtgttcatctgccactttatgtgacatataaaccatcgaaagcataataaagatatatgcttggattgttcctacaaatattgaaaatgcttgccaaacaattaatcctgggatactaataatccaaccccatgctggttcgttaaagaataagccagcaagtaatgttaatagtatctcacctgcaaatatgttaccgtacaaacgcagaccaagcgttaatgttgaagtgaactcttcaaaaacattaataattgccaatggccaaaacggctgtacataacctttaagatattgtttcgtaccacgcattttaattccataaaagtgagttaacagtattatcgttgtagacaacgttaaagtcactgttgcatcagctgtcggtgatttccaccacaatgtgtgatctttcgttactatagaaaacggaagacctaacatattagctataaaaatgtacagaatcagcgttactgctaagaagtggaattgaccaccttttttccaagccatgttaccttcaatgattcccctcacgaaatcaaaaatccattcaacgaaattttgtttgccagttggtctttttttcaaattacgcgtacaaatgatagcaagtagaaaaacaagaaacgccgtaacaagtatcatcaatatacttgataaattgaaaacgatatcaaaaccgaataaattccaactcacgagcggggatttgtgatccataatctcacctctttcttaatttatttgctcacctttagtaaaggacgtatgataactacaacatatgaaatcattaaaccaataattataccgatgatacttacatgcgctttattaaggtaccaaatcatacaggcaataattgcaactaagtatcgccacatatttccagttgaaatatgcatagtgtctggtcttttagctttagctaaatagcattcaaaaatacatgtgttgattgcagaaccagtaacaccaatgattaatcctaagataaatgcatggtgtgtataaaggtataatcctcccaatattattattagataaaaataatattgaatgaactgtttaaaaatgttgtagaaacgactcattttatatgcctccgtgtgactgatatcaatcatgaaaaccgttccactcatacaaactaaatgataatataggcgatttgtggtgtcaattctattcaaattgttgtaaaaaaataagcatagttagacacaatttagacacaattagacaaaaagtctattttcctcagaaatcgcttggtttttcagtgattaaattcaaataatacttaatatgattaactattctttctgaagcaaatccatcaccgtaaggattagatgcttcagacatttgatgatataatctctcatcatcgattaattcttttgcagcttgatacacattttgcttatttgttccaatgacttttaatgtgccagcttcaacaccttcaggacgttctgtaacacttcgcaaaactaaaactggcttattaaatgatggcgcttcttcctgaattccacctgaatctgtcaaaataaaataagattttttagcaaaattatggaaatctactacgtccaaaggttcaatcaattcaattctgtcatgactacctaaaatcttttgagccacctctcgaactttcgggtttttatgcattggatataccagtgctaaatcagtatactcatctattaagcgtctaaccgctttaaatatattttccatgggtttcccgatattttctcgtcggtgtgctgtcataagaatgaattttttgtcatggtatttatccatgatgttagatttataattgtcatcaactgtatatttcatagcatcaatcgcagtattaccagtgacaacaacactttctgaatatttcccttcacttaacaaatgcgatgcagcatttttagtaggtgcaaaatgtaagtcagctaatacaccaactaattgtctattcacctcttctggaaaaggtgaatatttatcataacttctaagccctgcttcaacgtgtccaatcggcacttggttataaaatgccgctaaaccacctgcaaatgtcgtcatcgtatcaccatgtacaagtaccatgtctggtttttctaattgaatcacttgttctaattgagtgattgatttagaagttatctcagaaagtgtctgtcctgatttcataatattcaaatcgtattttggtttgatttcaaaggtacttaatactgaatcaagcatttctctatgctgtgctgtaacaacaacaattggctcgagcattttttcttgttccaaagctttaactaaaggagccatctttatggcttcgggtcttgttccaaatatggtcataatctttttcatcaaactacttatctccgattcttctatttagtaccaaacaatctatctccagcgtcgcctaaccctggtgtgatatatgctttgtcatttagcttttcatcaagtgcagcaatataaatatctacatctggatgtgcttcatgcatcttttctacgccttctggtgctgcaattaaacacatgaagcgaatatttttagcgccacgtttcttcaatgaagtaatagcttcaattgctgatgcgcctgttgctaacataggatcaacaacaatgatttgtctttcagtaatatcttgaggtaacttagcaaaatactctacagcctttaatgtttcgggatctcgatataaaccgatatgtccaactctggctgcaggtactaaacttaaaataccatcagtcatacctaaaccagctcttaaaattggaacgatagctaattttttaccagctaatcgtttagccgtcattttagttacaggcgtttcaatatcaacatcctgaagctctaagtctctagttacttcatatgccatcaacataccaacttcgtctacaagttctctaaattctttagtacctgtatttacatctctaatatagcttagtttgtgttgaattaatggatgatcgaaaacgtgtactttactcataaaaattactcctatctttgtgtatgtttattgatatagaggatattcagctgttaatttcgcaacgcgttctttagcttgttgtaatttttcttcatctttactatttttcaatgctaaactgatgatttttgcaacttcctcaaaagctttttcatcaaatccacgcgttgttgcagcaggtgtacctaaacgtataccactcgttacaaaaggtttttcttgatcgaacggaatggtatttttgttacatgtgataccaactgaatctaaagtctcttcagcttctttaccagtaagtcctatagacccttttacatcaacagctactaagtgattatctgtaccgccagaaacaattctaaatccttcattaattaatgcttctgcaagaacttttgcgtttttaaccacttgttgttgatacgttttgaaattattttctaacgcttctccaaaagcaactgcttttgctgcaataacatgctcaagaggtccaccttgaataccagggaaaattgttttatctatgtcttttttatattcttccttacataaaatcataccaccacgtggtccgcgtaatgttttgtgtgttgtagttgttacaaaatcagcatattctactggatttggatgtaaacctgccgctactaatcctgcaatatgtgccatgtctaccattaacttagcgtttacttcatctgcgatttctttaaactttttgaagtcaattgttcttgaatatgctgatgctcctgccacaataagcttaggcttatgctctaacgctaatttacgaacttcatcataattgattcgttctgtgtctttatctactccatattcaacgaaattgtagaatttaccactaaaattaacaggcgctccatgtgtcaagtgaccaccatgactcaaattcatacctaaaactgtgtcgcccatttctaatgcaactaagtaaacagccatgttcgcttgtgaacctgaatgtggttgaacattgacatgttcagctccaaacaatgctttagcacgatcaattgcgatgctttcagtaacatctacaaactcacagccaccataatatcggcgtcctggatagccttcagcatacttattagtcaacactgaaccttgtgcttccataaccgcttccgatacaaaattttccgatgcgattaactctatgttgctattttgtctctgaaattctctctcgattgcttctgcgataactttatcttgcttggtgatataagacataaaatctccccttctttcaaaaaaacttattggtatttagcacgttcgccaccaatctttttcggcctagatgtggcaatagttacaattgcctgtcctacttgctttactgaggtccttacaggtacacatacatgtttaatatgcatgcctattaacgtttgaccaatatcaattccacaaggaacagtaatatgttcgaccacgatcggatccttcatatgctgaaaagcgtatgttgccaaactccctccagcatgtacatctggaacgacggaaacttcttccattgttaatggattatactgagatttttctattgttatcgctctgttgatatgttcacatccttgaaaagcaaaagtaacgcctgtctctttactcacaacatctaatgcattaaaaatagtttctgcaacttccatcgaaccgacagtccctattttttcgccaatgacttccgatgttgaacatccaattaaacatatatctcctttattaaaaaaggacatatcttttaattcgtctaataacattgtcaaatctttcataaaagcccacccttcctaaaaataaaaaaggaatatagcaaagtgctacactcctctattataacttatttaactgttaacatatactaattatacagaattcctactagcaaataatatcttttaattttaaaattaaacttacaagttcttcataggtatgtacatacatttcttttgttccaccgtatggatctataacttctcctgcttcttttacatattcatgcaatgtgaaaacatgattttgcaaaccaaagtgtgcctctattaattctttgtgcgaatacgacatcgtcaaaataatatctgctttcaaatctgcttcagtaaattgttgcgataaggtcgtttcagctaaatgatgttcttcaactaagtcttcaacataattcgaaacaccttgattgttcacagcgaatatacctcttgattcaaattgatgatttggcataacctcttttgcaatactttccgctaatgggctacgacatgtgttacctgtacaaacgaataaaatcttcatagttcacatcctttaataatgtgattacctgcagcttttaacatgcgattcataattgcttctgtattatcattcagctcaaagccgtatatatacgccgctgaaatattttcattttcatcaagtgaatgtaacacatcataaagattatgacttgcttgtttaacatcattgtcatcctgacataattgaatgaattgcgcttcacttggtataaacgccaccttattactcggcacaataaaagctatagaagaccaatctttaccgtcatttccaattttgctctcaatatctgtaataattgtaagtggtgtattgggtgagtaatgcttatacttcatacctggtgcaattggctgttcagtatcattataatcagcatgggcgatactattcggaagtatttctgtaatcattgctgctgttatagaaccaggtcttgcaattttataaggaaaagatgtgcaatctaaaaccgtactttctaatccttcttcactttgttcagcttgaacaataccatcgatacggccattcaaatcttgatatacatgattgaaagttgttggtgaaggtctaccacttaaattagcacttggagcagctagaggttcatttatgatttgtaataattgtctacctacagaatggcttggcattctaacagcaactgatgataaacctccagaaacttttcgacatagatagcctagctttaacggcaatataaacgaaatagggcccggccagaatgcctgcattaacttttctacgcgtggatccaaagtatatgtaaaatcttttaattgacctttactgtgtatatgaacaataagcggattgtcagatggacggcctttagcttcatatattttagctacagcttcttcatctgtcgcatttgctgcaagtccataaactgtttcagttggtaaacctattaaaccaccgtttaaaacaatgtcttttatttcattaattttaggatattgctgtaaatcttcattatattctctaacatcccaaattttagtatccaacttaatcacgcctttcttatttatcataatataaagcaaaaagctatgcacttaactaatcatagcaaaggcataacttctaattaccatttaaatgagacgattcgatcgtggccatttatatctttaataatgtcgatttttttgtcaggaaatttatttaaaattattgatttaagtgcctcaccttgattgtaaccaatttcaaaaacaactgggctgcctttttccataacgtgaggtaaatcttcaatgattgattcataaatagcatatccatggttatctgcaaacaatgcctgatgtggttcgaatctcgtaaccgttggagacatcgtaaccatatctttttcatctatatatggtggattagatatcaagccgttcaacttgataccttcattaattaagggctttaatgcatcccctgttaaaaattgtatttgtgattgatgcttctcagcattattacgagccatattcattgcttcaagtgaaatatcagtagcaataacatttaaatccggcttttcacatttcaaagtaattgcaagtacaccactacccgttccgatatctacgattgttgcatcatcttctaactgttgtaagaaatgcaacattacttcttcagtttcaggtcttggtatcaaacaatttgagtttacatcaaacgttctaccataaaatgaggcaaagccaactatatactgtataggctctcctaataacatacgttgtaatgctaagtcgaacttcataatcatcgctttcggcatatcatcatgcatgtggactacaaagtccgtacgcgtccattgaaatacatctaacattaaccattcagctcgtgtttgttcaaaccctttttgttgtgttaaatgaattgcttcatctaacttttctttataattcaccattattaagttctttcaatttatctgtctgctctgataaagtcagtgcatctataatttcttctaaatggccttccataatttgccctaatttttgaagcgttagacctatacgatggtctgttacacggctttgtggataattataagttcgaatacgttctgaacgatcaccagtaccgactgctgatttacgttgtgacgcatacttttgttgttcttcttgaactttcatatcgtataaacgtgcttttaacactttcattgctttttcacggttttgaatttgagacttctcagaagatgttgcaatgacaccagttggtaaatgggtaatacgtactgcagagtcagttgtgtttacgtgctgaccacctgcaccacttgaacgatacgtgtcgatttttaaatcttcatttctaatttcaatttctacatcttcaacttctggtaaaactgccactgtagctgttgaagtatgaatacgtccacctgattctgtttcaggcacacgttgaacgcggtgcgcaccattttcaaatttcaatttactatacgcgccattaccagaaactgagaaactaatttctttgtaaccaccatggtcactttcagacgcttctactatttcagttttgaatccttgtgattcagcatactttgaatacatacgcattaaatcaccagcaaaaatcgcagcttcatcaccacctgctgctgctcttatttctacaataacgtctttgtcatcattaggatctttaggaatcaataatattttaagctcttcttcaagatttggaagttcagctttaataccattactctcctcttttaacatttctacttcttctttatcatcagtctcacttaacatttcttcaatatcagctaattcttcttttttagctttatagttacgataaacatctacagttttttgtaaatcagcttgctctttagaatatttacgtaatttatctgaatcatttacaacatctgggtcacttaacagttcatttaactgttcgtatctttcttctacaatatctaattgatcaaacacttataattcctccttattattatcactaggtgctacgatatggtgcgcgcgacaacgtggctcataactttcattggcacctactaagataatcggatcatcgattttagctggtttaccatttattaatcgttgcgttctactagatgaagaaccacaaacagcacaaactgcttgaagtttcgttacttgttcactgacagccatcaatttaggcattggttcgaacggttcgcccctaaaatccatatctaatccagcaacaataacacggtgtccatctgctgatagtttttctactatacttacaatttcatcgtcaaaaaattgcacttcgtctattcctataacatcaacattagttaagtcgtgcgtcataatttcacttgctttagaaatattaatcgcttcaatggcattaccattatgagagaccactttttctttatgatatcgatcatcaatcgccggtttaaatacaacgactttttgtttagcgtatataccccttcttagacgtcttattagttcttcggatttaccgctaaacatactacctgtaatacattctatccaaccggaatggtaagtttcatacattgagagttccacctttttcaaaacataatcgctttattatatcatatttcaaatattcataaatgtctttttcataattatatcgatattgtacatgaacaattattttataaatttgtcttgcatatttatatacagctattctaatttgttgcttcttattcgtgcgatgtttctactcaatacaaactttaataaagggggaaatttatcattatgtattaacaacatggtattgagtcacttctttgaacacagtcgtaagtatatacccttactacgcttataaataaaaaagctgtctacaattccattataggatgcagacagcttaacgattactatattagttgtttgatttaagaccaaactttttgttgaaacgttccacacgtccatccgcagcagcgaatttttgacgtccagtgtagaatggatgtgaatcagatgaaatatctaaacgaataactgggtattcttttccatcttcccactccatcatttctgaagatgtttttgtagaaccgcttaagaatttgaagtttgtagtagtatctaaaaagattacttggtgatactcaggatgaattccttgtttcattattttcagctcctttgccctgaaccatctggaacagagttatttgtgagtttttacccaatactgtgtaattataaaggtaattaattcaaaacgcaagcccctatataatgtttattaaattataggtcgacccgttttagtactttcttctgcagacttttgtagctgcttgaagaaatcttcattattcttagaccttttaagtttgcgaataaatctttcagtaaagtcagttgagtcagtgaatagatttcttaattgccataatgtgtctaattcagatttacttatcaacaattcttctttacgcgttgaacttctgccaatatcaattgcagggaagatacgacgttcagacaatttacgatctaaatgtaactccatgttacctgttcctttaaattcttcgtaaatcatatcgtccatacgtgaacccgtatcaactaatgcagttgcaagtattgttaaacttccacccgcttcaatatttctcgctgcaccgaagaatgcttttggtttgtgtaaagatgcaggatctaaaccacctgataatgtacgaccacttggtggaataactaagttataagcgcgtgctaatctcgttatagaatccattaaaataatgacatcttccccaatttctactaaacgctttgcacgttcaagtaataattcagctactttaacatggtgttctggtggttcgtcaaacgttgaatgaacgacttcagcagcttctactgagcgttctaaatctgttacctcttcaggacgctcgccaactaacaaaataaatagctttgcatctggtttgttcgtactgattgcattcgctatttcttttaataacgatgttttacctgctttaggtggcgccactattaaaccacgttgacctaaaccaatcggtgttactaaatccatgatgcgcgttgaataattttgtgtttctgtctctaatttaatacgctcatctggataaagtggtgtcaaagcttggaaatgcggacgtttcttcacttcttctgcgttatggtcattgacaaagtcaacttgtaataagccataatatttttcgttatctttaggttttctaactttcccagttactttatccccacgtttaatttcaaaacgacgaatttggctagcagatatataaatatctttttcccctttagaatagttcactgttcttaaaaaaccataaccatctggttgtatatcatctaagataccttccatataatagttaccatctttttccatttgtgcttccataatagctagaacaagttcttttttatttaatttactatagttcgtcaacttaagagttttagctttttgagtgagttccttggtagtatagttcttgtacaattcgtggaatgattcatactgaggagatgtacgttctctttcaggcatatagtttacacccatttcattattttttagttagtaagtaatagataggcatgacaatgcataaataactgtgctagcacaatcccattatgctaatccccaaccttttaaatacatgaataactatagcaaatttttattttaattacaaaatctatttataaaaattgcaaaattaaaacagtacacaaaacttaattagtcatgtgcactgttttattgcgatttttaattcaaaaatcaaatttatttaaaatatccagctatagatttcacttctaagaactcttcaataccataatcgccccattcacgacctaaaccagattgtttatagccaccaaatggtaaatctggctttctacctgcttcgtttatttctactgtacctgcttcaatagaacgagctactttatgcaatgtttctttgtccttaccaataacatatcctgccaaaccatattttgtatcatttgcaatttgaatcgcttcatctaaatcgttataagtgataactgacattactggcccaaaaatttcttcttgtgctatcgtcatttgattatctacattaataaaaattgtcggacgtgcaaagtatcctttttcaagtccttctggtttaccaggaccaccataaaataattcagcaccttcttcaatacctttattaatataattttgtacttgatcaaattgttttttactaatgatagggcctacttgtgtaccatcttctcttggattaccgacacgcacttggctaaattgttcttttaattcagctaagaatgcatctttaattttgttaggcactaaaacacgtgtaccagctgtacatacttgaccagtattattaacaactttgcctgttgttgctttagccgcttctttaatatctacgtcatctaggacgatatatggtgatttgccaccaagctctaatgatacctttttaaaatctttagcggctttttccataattttagaaccagtagggcctgatcctgtaaatgacatcatgcgtactttaggatgttcagataaaggattcccaacaccagcaccatcaccattaacaaggttaaatacacctttaggaacaccgactttatcaaaaatctcagctaaaataacagctgcaaatggtgtttcttcagatggtttaagtacaactggactaccagccgcaaatgctgctgctaattttaatgatgtttggtttgtagggaagttccacggtgtaattaatccagatacaccgattgcttctttaacaactaaatcatctccgcggcgttcttcaaattcgtagttatctaatgcgtctctcgctgcaacaaaatggtttagtcccatttgataatggacacgctcagataatgataaaggagcacctaattcatccgtaatagcttgtacaatatcgtcttttctgttttcatattcttttacaattttatctaataacgcttgtctttctttcacagatgtatgacggaactctaaataaacatcgtctgccgcctcgacggctttatcaacatcagctttattacctttagcaactttcccgattacttcttcggttgctggatttataacttctatcgtttcattactattactttctacccattcgccattaatgtattgctttgtgtagtctctcattattctttcactcctcaagaatgatttatatattatttatccgtaatgcatacgatataaacattacattccattatgatacgctcccttttaatatgttcaaaataaaatgctttaaaattttgctgcatctatttttttatatttttaaataaaaataactattcccacatcatcgcaaataatgcgaagacttagaaatagttataatcaatgctatgtttaaacgtcatgtaattatttagcagtacgttgatctgttaaatcgacatatgattgcgcccatgcttcaattggatgtaaagcctctgctaacgctttacctttttcagttagcacataaataatttgtactggactcgtagaaatgatttgcttctcaactaactcccattgtgcaagctctgacaacttaagacttaaagcacgtggtgttattgttttcaaatctcttttcatatcggaaaagtgtgctgaacagtcattacatcttgagagataattaatgattaatccattccaacttctaccaagtattttaaaagtttcttcgagatacggacatacttccatcatcttcacctctcatcaataaatttagaatgtaaacgaacaccattttttaatcagtataattattataccacaaaacaagataaatctatacagtttccgtccaaatatctgcacctaaagcttttaagtgttctacaatatctgtataacctctataaatatgtttaacattgtaaattgtagttacaccctcagcaattaaaccagcaataattaaacaagctcctgctcttaaatcgctagcataaacttcagcaccatgtaatgttgatggttttatcgttgctgtgccttcgtcaacttcaatatttgcacccatgcgctttaattcttcaacatgtttaaaacgctccggataaatcgtatcagttacaaatgaaggaccatttgccataaataataatggtgtaataggctgttgcaaatcagtagcaaaacctggatatactagtgttttaatatcaacaaattgatatggcgcattattattgatgcgaattctttcgtctcttacatcaacattcacacctaattcactaaatttagcagttaatgtttctacatgtttcggaacaatattatttaatataacattttctccacatgctgcagcgatacacatatatgtgcctgcttcaattctatcaggtataacttgatactcagaaccatgtaattctttgacgccattgattttaattgttgatgtacccgctcccttaatattagctcccatacttgttaagaagttagcaacatcaactacttccggttctttagcagcattttcaattacagtttgtcctgttgcataaactgcagctagcataatgttaattgttgcacctacgctaaccatatctagaaaaatatgtgcaccttttaactctttagcttcgattttcattgatgtcgtacttgattcatcaatttcagcacctaaagctttaaatcctttaatatgttgatcaattggacgtggcccaagtggacatcctcccggtaaaccaatcacacattttttaaatctacctaacatggcacccatcatatagtatgaagcacgtaatgattcaactttattatttggtaatgcagcattttgtatttcagttgtatcaacttctaattccgtaccatttagtgatgccttaatatttaaatcttctaataaactcactaaagttttaacatcagagatttgcggtaacccttctaatttcacatgtccttgagctaataatgttgcaggaatgatagctacagcactgtttttcgcgccactgatattaacttccccatttagtgtgcgtccacctcttatttttattacctcttgagccatatcatttatctcctttgtccattactttttaattttttgcattattagcattataaattaattttactttatttgtaaaatagtttattttaatcgttaaaatcttgtctttctattttcgattgattaataacaaatcattcacctttactaatatatgctgttcttccccacttgaccatggtctaaagtctgattattcaactaaatattgacgttgttttgacaattatttagttttaattctacggttttcacgtaaacttttttcataaattgctcattttccttataattatatcacaatcaattttgatatattttaccatttttacgctttcattttaaaatcaaactgttttatttattacttatacgacataaaaaagaagcaaacaccattttgtctgcttcttttaaaattaatatccctacgttattaataacttaaagactaaatattaattatttagcgcggttagaagtaccgaactctttaattttacctttaactgtttctttgatggcttcacgtgcaggtcctaagtatttacgaggatcgtaaacttctttgtcgttatttaaaacgtcacgaactgcttttgctgaagcgatttggttttcagtgtttacgttaattttagctgtaccaaatggaattgctttttggatatctttagtcgggataccagtaccaccgtgtaatactaatggtaaacctgtagataaaccgatttcttccatttctttaaatcctaattttggttcacctttgtatggaccatgaactgaacctaatgctggcgctaatgcatcaataccagttttttcaactagttcttgacattctttaggatcagcataaatgatgccgtctgctacaacatcatcttcttgtccaccaacagtacctaattcagcttctacagaaacacctttttcatgagcgtattcaacaacttttttagttgttgctacgttttcttcgaatgggctgtgtgaagcatcgatcattactgatgtgaaaccagcatcgatagcttctttacatttttcaaagcttgaaccatggtctaaatggattgctacaggaatagtgatgtttaagtcatgcattaacccttcaaccattttaacaattgtgtagaaaccgctcatgtaacgagcagcaccttcagaaacacctaaaattacaggtgcattttcttcttgtgacgcttctaaaattgcttgagtgaattctaggttattaatattgtattgacctaccgcataaccattttcttttgcatcaattaacatttctttcattgaaactaaaggcatgaaagttcctccttgagtgcttacgcacgtatttttcaaagtaattatatcaaaaaaatagcgtcaatgcattgaaatactgcagattaaatgtgtattttttgaaaaatgcgatagttatactaaatgcaaacgtatacatttttatacaatttaagccgttgcataatatgtagtcattaattacaatattttataagtagattggaggataaagatgtcaaaaatcttaaacacacaactaataggtatctttaataggctagaaaaacaatctttagaaattcaaatggccgcccaatgtttaattcaagcaattggtggcgaaggttatgtttatgtaaaaggttatgatgatttacagtttttcgaaagtttcattctacatagtgatgagcgtttaaaatctagccgaaaacttgacgctattaaagactttaaagaaattgactcaactgatcgtgtattattattcgcaccattttataatgatcaagttgcattagatattcaaaaacttatcgacttagatatcgatgtggtcttaataagcaacaaacctaaaacagatgatttccctgatcatctcgtacattttatcgatttatctacaccaagacctatagtctacactgaagattacgataagattgtccaaccacatgcgatggcattgaattatgtatactatgacatttatacacaaatgattgaaatgacaagagacttagaattataaaagtcactattgttatttcataccttgtcactaacataatattaaaattatacgaaaaaccggtactttcaatgtttaacaatgaaagtaccggttttattagcaaatttatttattttgttgatattttaatgaagcttcaataaatgatttaaaaatcgggtgcggacgatttggtctagataagaattctgggtggaattgacaagcaataaagaaatcatttgtcggaatctctaccatttctactaaacgtccatctggacttgtaccagaaatcaccataccatttgcttctaattgttctctatagtcattattaaattcataacgatgacgatgtctttcttcaatttccgctttaccataaacatcttgtgccaatgtgccttctttaattgaacatggatataagcctaagcgtaatgtaccacctaaatcttcgatatctttttgttctggtaataaatctataattgggtatggtgttgctgggtctaattcagctgaatgtgcgccttcaaggcctaatacgtttcttgaaaattcaactgttgcaagttgcattcctaaacaaataccaaagaatggtacattgttttctctagcatacttaattgcactaattttaccttcacttgcacggaaaccaaatccacctggtactaaaataccgtcgacatctgcaaggtattcggctgcattttcatctgttacttcacttgaatcaatccatctaatgtcaatatctttggcaaaaggatatccagcatgtttcaatgattcaacaactgataaatatgcatcttgtaagctaacatatttacctactaaaccaattgtaattttaccatctaaattattaacgatatctaacaactgtttccattcatcaagctgtgtttcatatttcgcgtttaattgtaaacgtttaataacgatatcatccatattttgttggcttaattgtaatggaatttcgtataaagagtctgcatcacgacattcaataacactttctttattaatgtcacagaataatgcaattttatcttttaaatcttgtgtcatttcatattcagttcttacaacgattaagtctggttgaatacctaagcctcgtaattctttaacactatgttgtgttggcttcgttttcatttctccagcagctttaatataaggcagtaatgtacagtgaacatacataacattttctctacctaaatcgctacgaatttgacgaatcgcttcaataaacggtaatgactcaatatcacctgttgtaccgccaatttcagtgataacaacgtctgcattcgtactttcccctgcaagtaataaacgttctttaatttcatttgtaatatgcggaataacttgaactgttccgcctaagtaatcaccacgacgttcttttttcaatacgtgtgaatacactttaccggctgtcacatttgaaaacttgtttaaattaatatcaataaatctttcgtaatgtcctaagtctaggtcagtttctgcaccatcatccgttacgaatacttcaccatgttgataaggactcattgtacctgggtcaacatttaagtatggatcgaatttttgaattgttacatttagacctctatcttttaataatctacctagagaagatgctgtaatacccttccctaatgatgaaactacgccacctgttacaaaaataaattttgtcatgtcttgacctcctaattattaaagggaatgcttcctcatcaattgtaaaaattacgtaaaacataacattaaagcaagctcattcaagttgtttatttgtcgaattcgacaaaattaaattctgtttacttaccgtttccatactgctatgtcactatgtatatcatttacaactttgatttttgcgttatcatttcttgatttactcaattaaataaaaaaacgctccctctcacaaattctgtaaggggagcgtataaattttatacacgtgtcctatttaaaggagcccgaataaaattttatcatctttcaactaaaagtcaaacaaaaaattaatcgttgaagtcttcttcgtcttcaaacacttcttcgtcttcgtctagttcatcttcatcttcttcaatgactatatccgaatgattgatttcttcttcaacctgctcatcttctggatcatttagttcttcttgatcatctgtttgagctggaatatcatcgtcgtcatccatttcatcttcgcccaataattttaagttttgatcttcttcatcatctgcatccagaatatcgaatttttgaatagttggtgcgattttctcttcaatatcatctaccgaataccaatcacgtaatccccataaattttctccaacatttaaaaaacgaccatctgtgtttaaatccgtgtaaaattgtacaacacgattttcaatttcttcgtactcataatcacctaacgctctaaattcatcgatgatatcatataagttcattgtttcgcctttatcattcaataatgtataagccatatcaataaatgatttttcatcaaccatttgttttgtataatcttgaattttcattgcccaatacttcctttcgaaggatataatctaaatttatacgtctgaattcatttatatatagtaacaaaactaaattataaatgacaatatcatatttcgcaatcactgttagtaatttaaatatttttcgaaaacgacataatcatcagtttgttcgatttcaacgaaattactatttaaacataatggtttaaaatcattattctctccaaacagaatcatcgtaatcacattaaggttgtcatagttttttcttaagtaagttggcaattgtcgcagagcacttgaaccaataccattaaagcgatatgatttatccacttcaatagcagcaatgttcatgcgttcaccaatctgctccaatgcgataaagccaaccttttggccatcaatcattaaattaatgatatgtacattggtcacttctgaacgactttcttcttcaagctttaatgatgaaacatgttttgaatctaagtccaagtaatatagtcgttctttgccaattggtccttcttctttagtcgctgtatgcatgaatccagcacgttcgtataggttccaagcattgtcattttccgcatctactactagatatagatgattaaaatcaggaaatacaccttgaacatattgcggcaatgacatcattattttcgtgccatatccaaaaccttgatatttttcattaatcgataatgaacgaatataaacgacattttcaggtgtatcataaccttcatgctgatagtaacgatgtaatacaaaaaagcccaccacttcatttttatcgtttattgctacgttagcaatcctatcagcatcattaattgcatcatcaataacttctttaggtaaagatgaatatatttgttgtctttcattcaagtcaaaatcattaattgctgaacgatattgttcatcaaatgcttttaaagtgataccttcaaaacaaagttctttagccatatatttaacccctatctttttatatatgaagcatgaatccccatattattttacctattatttcactacgataccattatttgctctaagttaaataaattacttatttatattttttaaatttcaaaattaatgtactattcctcattacttatcattttaatcagagacttacaaatacactgcgtacgaactacttttaatattgcgtcactaactaacaatcctatacaacttcaaaattcctagaaaataatatatataacttaacgtccacgtttgtaaaacattaattgcgatacgcttacaatgttgaaatgcaatggcatcaaatttgttaataattactattattacttgttttttagtcattttactatactattatttaaggatagacattaataatgaggtgggaatcttatgaaagttggcattgacgctggcggtacactaattaaaatcgttcaagagcaagataaccaacgtacttttaaaactgaattaactaaaaatattgatcaagttgtggaatggttaaaccaacagcaaattgaaaaattatgcttaactggaggtaatgcaggtgtcattgctgaaaacatcaacattcctgcacaaatttttgtagagtttgatgctgcatctcaaggactaggtattttgttaaaagagcaaggccatgacttagcagattatatttttgcaaatgttggtaccggtacgtcactacattatttcgacggccaatcacaacgtcgtgtaggcggtatcggtacaggtggaggcatgattcaaggactcggttatttactaagtcaaatcactgattataaacagttaactgacatggcacaacacggtgatcgtaacactatcgatttaaaggttagacatatttataaagataccgaaccacccattcccggtgatttaacagcagctaattttggtcatgtactacatcatttagatgctgattttacacctagcaataaattagcagccgttattggtgtcgttggcgaagttgttacgacaatggccattactgttgcacgtgaatttaaaactgaaaatatcgtttatatcggttcttcatttcataataacgctttattacgcaaagttgtggaagattatactgtgttacgcggttgcaaaccgtactatgttgaaaacggcgcattttcaggtgctattggtgcattatatttagaaaaatagaaaaagaccatttatatgcgcgttgttttaaataaacgctatataaatggccttttattttatggtctaagtgttttgaatacgtattgttccatttattatcacttaattacttacaactcaattcaattaaaatgtaagttcattagacaatttttgcgctgaaacaattgtaccaaccacgccagtttttaaatctatcgcaacggctttatgatcatctctaagttcatctagccattctccgaaaacagaaccttcaatcgtaattaaatcacactcttcaaaatcttcatctcgaacttttaacgctctgtttttaatactccatacaggcataatatgcggctttttttcgtcgctatcattttcactaatgagaataaactgcttactaccttttttagttaagccgtatacttcatcatatttcgctacatcttggacaaattctttgattctaattttatctaattccgtcatcacttcttgtgtaacagctacaacgtttagtagatgcccttcttcttccattgtttgattcataataatatggtcttgttcatcaaacaattcatctaattcataagtagcaaaacgatcaacgtccatttttacaactttatcaaatggaatatcacgacttgttaaaaatgatacggccacactttcttctgtccaaacgcctacatacgcttcacttttataatttaggcgtactagttttttatttttagaggcgaaataaatacattcatttattaatatatctctaaagaatggatatgctttataagacatgcttgaccctcactttttaaaatatgtcatacataaaatagtaaatgactccaacaagttagtcaattagacatattatgaattcaatttaatgtcatgtttttcattttaaaaattcaatagcattaaattttacgtatacacaaattcggtctataacacgaaacatatctagttactaaaaatttcaaaacgataacctttagtatacctttatcaacaaaatggcaactcttataacatagtgaaataaaagtcgccatttaatattagtattacaaagtattgccatatcataaatttaattactgttgactagaatcgaaaaaagcttgttacaaacgcatattcagtcaactactggcaacacaacattgtagcgccttatgttccgaactctaatagtgttcaagttcagctaaaaatgcgcgttcattctccagtactgtttcttttgaatcaccatgccaaatacagccaaaccttgatttaactttatcttcaccgtaccaatcaccatcataataagataacgggtataaactaccttctttgacatatttcaaaatcgtattgaagaaatgtgtgttatcaccttttgaatgataactataaaacttttgatatcctgaattcaactcgttagcaagtaataacatgctcgttgaaccattttgtctaaagtttaaatcaatcgcataaacgttatcatcctcatcgacgagtaggtcaaaaccagctacaccaaagaatccttgattcacaccgttttccataatttgtctacctgcttctataacgtgctctggtacattagtagtattttcatttccgttataaaatccgtacttatccgttaattgcgttgccgcaccaagatattgaatgcctagcgattccgagtatgcaaactgaacgcaataattcgctttttcttcaatcttctgttcgataataagcgaattcgtttcagcagttgcctctttaatacgcgttatcgctttttgtaaatctgcatcatgataacaaatcataacgccatagccacctgctgtcggaagatcatctcccggcttaattactaacgggaattcccaattcttaatctcgttttcgaattgctcaatttttacaacttttctttttggtaaaaacttcccatttgtccattcaggtattcttgctttattatttaaagcaacaaataacgttttatctaatgcataatattgctgattcaagattgtttcatcatgaatatattgaaaataaatctttttattttccttatgtgccaattgtttgatcaagttttcgtaagattgctgattgttaaatgtataaattgagttcggtacttccttaccaataacttgaaatagctgatgcaatttgtctgtcgcactagcttcgtgaacaataacaggtaattgatttgctattaataactccctaccagttaaaaaattagattgatgttcgtccggtttcaaccatggattcgatatatacgaaggtcttgacgtatagacaacatctttgtcatataaatcacttaacgttaagttcggctcattaccattatttgtcattacttcccattccctttcaaatgcgcatgctcttcaataatgtcttgataaacgtcttgatttgtaattaactctaaccccatcaacgccattattttagcgcctttaattaatgcttcatcaccatgtacactcgcagccgcttctctaaatctatgcgtatgtcctactaaattacgtgatcctattttaatatgaggatgtattgttggcacaacatgacttacgttccctgtatccgtagagccataaccaaaatcatcatcaataactgcttcaccaacttcttcagcatatttagcaaataaatcatctaatttcggcgttttaatgaattcattcacaccgttttgaattcgaccaaattcataatcacaaccagtctgtatcgcagctccacgtgcgatttgatttactttttctgttaatatatccaattctttacgcgtcattgctctagtataaaaacgagcatgtgtatagtctggaataatattagctgctttcccgccatctaaaatcacaccatgcacacgttgatcttttttaatatgttgtcgtagttgtgctacaccattaaaataactaatcatagcgtctaatgcatttaacgcttcatctgcattttcagaggcatgagcactttttccgtaaaatttaacatctaaaacatccactgccaaagtatcaatcgttttataagtttcatttcccggatgaatcattaaggcaatgtctatttgatcaatcacaccagccttgacataagaagctttagcgctaccattttccccaccttcttcagctggacatccaagaacgactactttaccaccaatttggtcaatcacttgcttcaaaccaattgcaccaagaacacttgcagttccaatgatattatgaccacaagcatgacccaatcctggcaaagcatcgtattctgctaaaaaacctatagctggcccgtcaagtcctgaatcatatgtcgctataaacccagttgcatgcccagcaatctcggtttcaatttcaaaatcatgctctttcaaacgatctattaaagttcgagacgcaaatatttcttcattaccaagttcaggacgttcatgaattctatgactgatttcgatataactatatttatttgtttctatataatcgagaatttgttgtttttcactcattttttactatctcccttttaccctacactcattttaatcatccacaatattttgttctttcaaaatgaattattacttattctatcggttttatctcatgatgtcatctagtttttctttatttacaaaattttctaataactaaaagcctttcataaatttataaaacagtttcaaattgtaaaacataagccctattgttacaatttaagtattgttagaaacacaacttacaacaaacttaagttttataatgcaacaaatcataagcgttttatagttttgagtagttaataggaggaaattcaaaatgacaaaaatgaatgttgaaagtttcaatttagatcatactaaggtggttgccccatttattagattagcgggaacgatggaaggattaaacggagatgtcattcacaaatacgacattcgtttcaaacaaccaaacaaagaacatatggatatgcccggactacattcattagaacatttaatggctgaaaatattagaaatcatagtgacaaagttgttgatttaagtcctatgggttgccaaactggtttctatgtatcatttattaatcatgataattatgatgatgtattaaatattgttgaagcaactttaaatgatgtgctaaatgctactgaagtgcctgcttgtaatgaagtacaatgtggctgggcagcaagtcattcattagaaggtgctaaaactatcgctcaagcatttctagacaaacgaaacgaatggcatgatgttttcggtacaggaaaataaatcttagtcaatcaagttaatcagaaaagcagtcgaacaatgattttacaatcgccattgtccaactgctttttattatgcttcaaagtcaaaaaatcgaacaaatgaaaaagtaaaatctttaacatttgtccgatttatttgagaaccactataatttcttaattagtcccattaacacgaactgcataggtaaccttaaatatagttgccatgttggcaattgtttatctcctaaaggtaactttttaactgccatatagatattagctgggaatacagctagcaagaatagattgattgtatttttcaagcattgagatggtcttttaattaaaagtgcaagtccaaataatatctcaaagattcctgtaacaagaaccgctgtttttcgaagtggcaaacatttcggtatgatatttctaaattgtcgttctcgtgtaaaatgcaatacacctattacactaaaacctattcctaataaatatcttagtatgttcaatcagcttcaactcctattctgtaatgattttatgaattaatgtaggcgatacaacatgatcagcaattgttatgcttgaatctaattttttaacaacatcgtctacatcttggcgattactgtgaatcgttaataatgattctccttcttctactttatcaccaatttttttatttaaaacaataccaaccgctaaatcaatatcatcctcttttgttaaacgtcccgctcctaacatcatcgaagcgacacctatatcgttagagactaattcagtcacataacctgattttttagctttatattcaatttgatattgagcttgtggcaaacgctctggatggtcaataacagtttcgtcgccaccttggtttttaataaatgttttgaatttttctaatgctgcacctgaattaattgcctcaattagcaacgctctcgcttcttcaagcgtttcagctttgtttgcaagtacaaccatttgagaacctaatgttaatacaagttctgttaaatctttcggaccttgtcctttcaacgtatcaattgcttcttgtaactcaagcgcattgccaatcgcacgtccaagtggctgattcatatcagaaataatcgccatcgtattacgtcccacattattaccaatacgtaccattgcgtgcgctaatgcttcagcatcttctaatgttttcataaatgcaccgctaccagtttttacatctaatacaattgcatctgcaccagcagcaatctttttactcataattgaagaggcaattaatggtattgaattgacagtaccagtaacatcccttaaggcatataattttttgtctgcaggagttaaatttcctgattgtcctacaactgccactttattttcattaaccaatttcacaaatgttgcttcatctatttcaacatgaaaaccatcaattgcttctaatttatcaatcgtaccacctgtatgacctaatccacgcccactcatttttgcaacaggaacatctacagctgctactaatggtgctaaaaccaatgtagttgtatctcctacaccacctgttgagtgcttatctactttgacacctttaatatcactcaaatctatcatatcaccagaattaaccatagccatcgttaatgctgcacgctcatcatcattcatatcttggaaataaatcgccattgctaaacttgatgcttggtaatcaggaatatcccctttaacatagccgccaataaagaaattaatttcttccgttgttagtgtatgaccgtcacgctttttctcaataatgtctatcattctcatttttatcatccttttcttaaaaagcttaggacaaagcatctgcgctttctctagtccatttttaaaagcacaagcgaaaattattatagcaagctatcgatttcatttttaatatcacaatttcaatgcgatgttattattcttaaatagattggttataacgttaaagtccctattaaattatcttagaatcatcatggcatttatgatgtcttaaagctgatatcgacatacttatatatggttacgatgtcccatgcttacatatttttataaaattagtaatctgaatctgcttctaaaccttgcataatttgaacgcctgcgctcgcaccaatacgtgtcgcacctgcttcaaccattttattgaaatcttctaaattacgtacgccacctgatgcttttacttctatatcagcacctactgtatctttcattaatttaacgtcttctgcagtcgcaccgccacctgcaaaacctgttgaagttttaacgaagtccgcaccagccgcttttgttaattcactcgcttttacaatttcgtcatggtccaacaataccgtctcaataatcacttttactgtgtgacctttcgcagctttcaccactgcttcaatgtcttgttgtacatcatcaaaacgtccatcttttaatgcgccgatgttgatgaccatgtcaatttcatctgcaccattttgaatcgcatcttctgtttcaaatgctttcgtcgcagttgtcgatgcacctaatgggaatcctattaccgtacaaactaacacctctgaatcagctagtcgctctgctgcatatttaacatgcgttggattcacacatacagatttaaaatggtatgctttcgcttcatcgatgatttgatcgatttgcgtacgtgttgactcaggcttcaataaagtgtgatcaatcaattttgcactattcattttctatctcctcctttatggttgattataaaaatacggttgtaaattagttgattgagcgtcaggttcatttaaatatcaggttagatgttcgctttttatgtaaccgcatacatatactattacattaattcattccccataaacaaacaatacaattgaacgtgatatcttcattatgaacgatgacttgacaacaagctaatcaggattatatttttataattctttaattctatagtacaaaaattcgcaaaaaagggaaacaaatgttatcttaaaattattaatgaatattaaggagaagataacaaatgacaaaaggtacaccacatattcaaccaaatggagtaaaaattgctaaaacagtattaatgcctggcgatccgctacgtgcaaaatatattgctgataattttttagaaaatgttgaacaatttaacgatgtacgtaacatgtttggttacactggtacatataaaggtaaagaagtttctgtaatgggttctggtatgggtattccaagtattggtatttactcatatgagttatacaacttctttgatgtagatacaatcattcgtatcggttcttgtggcgcattacaagaaaatgttaacttatacgatgttattattgcacaagctgcatcaactaattcaaattatgtagatcaatacaatattccaggtcatttcgcgcctatcgctgacttcgagttagtaactaaagctaaaaatgtcgctgaccaaatcggtgctactacacacgtaggtaacgtattatcttctgatacattttacaatgccgatccaacattcaatgatgcttggaaaaaaatgggtattttaggtatcgaaatggaatcagctggtttatatttaaatgcgattcatgctggtaaaaaagcacttggtattttcacagtaagtgatcatattttacgtgacgaagctactacacctgaagaacgtcaaaattcatttacacaaatgatggaaatcgctttagaaatcgcagagtaacttatttaaattgactttaattgctctttaacaatgcgattaaactcaaaaagccaacacattctgggcgtatccccatttatgtgttggcttttatttatattattacttatctgtagattagcttaagtaagatttaaacatccaattatgtttatctactgatgtttgcatacctataaacatatcttctgatacatcatcgccagcattaccagcaatttcgattgcgttttctaattgttttgagatatttgtgaagtcttgtgataattcttcaaccatttgttctgcagagtaacctttcgcagcttctttaacaattgattgctctaagcattcagttaatgtacctacagggtttcctcctaccgctaaaattctttcagctaattcgtctacatattggcttgcttcattatataattcttcaaatttaacgtgtaatgagaagaagttaggccctttcacataccagtggaaattgtgtagctttgtgtaagctactgtccagtttgctacttgttgattcaattcttttacaacatcttgttgattactcatatttaatacactccttaaaattgtctacgtcttgcttgtttatattaattattatattataataattctaatctgtaaagtgtttttactctcttttttataattattctaatctaaccgtaaagtgttccgctatttaaatgcctaaattttaattcatcatctaatatatccattatcaattagcaagtatgttttatcaatcagtaagttttactttcgcattatcatctaaaaagaacgatttttcataatcatttggttggtgccatgttgttttccacattctatttctattattagcaaacattcgataaccgaaattacggactggtttaggtacaagccataaacctacgcccaataatttagttcgattaggtagtgctgtgattagtttaataatcgcctgcgattcaaaatatatacgatcacctttctgtaaaatcacactatttttatttgccgcttctggatgttgtttaaaaaattgttggccaacttcaccttttaacgtggcaaattgataatttcttggtaggtcatgttgaattaaccaaatgacatagttataacaatatatacagtttccatcataatatacgattggcataatttattcgctcctttaatagtacttatagtcatttttcctaatttaaaaacatttaaacaaggttgtcacttgataagtcctcgcgacacgaaattgccataaaatttatttttcagttttatatttattgtataatgtattttttatttactttaaatttctcaatctacagtgtaatcttatttcttattattaacttagcgtttggtcattcgtcttattcaacataccactggaaaactcatataaagttttaattctgtaacataaattcttttatattcatatactgtctttattatttattaaaataaaaacgagtaatctatcataagctcttaattagctcttatggttgattacccgtcattttttctttatgcggttattcaaatatgcaattatgcaatttttaatcctatccttacttcttttcaaaaactaccatatatcattagtcatgtttgactttgactatacgtgtgtattttaaaaactgctctgaatatttctccttaatttcctctaaactgtcatatgtaatacctacaatatgccaattaggattgaaataatagaaagaatctttttgtcgtgaccatttaatcatattaccgtctttattataacgtggtaatgttacttcatagccttctaacacattaatatacgtttggaaaatgtctgtatctatacgattaaaattatcaataactaaataacttttatcctttttaggcattaattgagtaataaacccttcacgatagtataatgcccctgtttcatttggtaaatacttgccataaagcatatcttctgaaaaatcaggatgacctgttgttataacaggatttgcattcgctttttgcaataagtcattagccgcttttaagccttcttcttttcgatctacaacaagtaaaataaatggctttaacgcttcttctttttcactttcaagcatatctggtttttgaaccatttcaaatggagatttcaatccattattatcgctcatttcaataattgcatcatactgtgcttgtgacatacttgcaatagcctgttttgcattttcttgaaggaaatataagtttttcaatttaggatgcttatttaatgtacttaatgtaatcggtgtaatgtctttctcataagacacttcaatcactgtactatttgttctaccaggaattggtggtttttcatgaatatgctttgatacttctccaattccaacgacagattgatttttcgttcgattataaaaaataatattgtcgccttcttctaactgagtataaaaatgataaccattacgtttaataccgttgtacgtgtgcgtataaatcgtatattggtttccaggttcaaattcttcagtttcagctaaaaagaaataacgcggtatcttaatttcgcctttaccaagaccacttattaaatcaaactcttctgcagtgatttgattgaacaatgtctctttcatattacttatacgaaattccaaagcttcactacgctttaaataatctgctgttaatggtttcaattgttcattaaaacgaaactgtacacgtattttattttgtgcacctgtttcaacactaataatttcaccacatccaagtagtccagtatccgtctgaacttgataaaagatgacttgatctcctactttagcctttttaaacgctctaaatccttgagatgggttaaaatgtgcgcctgattcaaataaagctgtttgtcctactaacggttcattatgattccaacggttatatccacaattcaaccaaaaataattcgtttctgctgtcatcttaatactccttaacctgaataaattttagaaacactatgaattacattcttttagtgtttcttatgcagttggacgcgtatgcgaacaactgtataccctttgttcactgcgattttaatcgcatttcctataacattgtagcgcccaggacattaatttacgtcccagacccttatcgttttcacttctaagtaagtcgaactattttgctttacaacaagtgcgactctaaatacagttggacacacatacgagcaactgtataccttttaatcagttttctatattttatttattatatctgtcttaatgataaaaattgttacaaacagtttaacatatttagctacctattttgcatataaaaaacatgcttgcatacactatgcaataaaaattacaaatttatatatgataccactatgcttgcttatctctatagcgccattgatacacatttttaaatatctatactgccgttagaattttatcatgtcttaattttcattaaatattaattacttcattttatataaaccaacaaaaaccccctcactactatgcaagtgagaggttatgttgatgtgctttattttcatcaatgtcattaacacaatcatatttcttctgttaatgcactgtattatattcaaacgcgctatcgacaattaatttgaagctacaaaggtaccgcataatggcagcacattaattaacaatgcgctaaactttaatgaggcgctgatttgcttgtctttaaaagtcaacatagcactgataattcctaaaatagctactatacgtggaattgtcatgctcggatactgcggtatatgtaagaaagcaccaagacctgctatcacaccacatactaacgcaatatatagaaattgcttcaaatcattcactcctaaattgttattacactattacacatagctaatcatcaatgtgaaatcaccttcaaagacactatccaaatcttcagaagtcaaaataaagtttgtaccagtagtcagtttgaaaatttcaccatcgacaatcatttgcccttcgccttccaacactgtaactaaacagaactctctaggcttcatataatttaacgtgccagaaatttcccatttaaccaatgtaaagaaatcattcgatacaatgtgtgtacacttatggttttcaataatttcgctttcaggcaaaatattaggtaatggtgcattgtactgaataacgtctaaagctttttcaatatttaacggtctatcattatattgattatcttgacgattgaaatcataaagtctatatgtaatgtctgacgattgcatcgtttcgtatgctaatattcctgaagaaatagtatgtactgttcctgctggaataaaatagaattctccaggttttactttaatatatctaagtatcgactctatcgttccgtgttgaacatgattcgcaacttcttctctagactctgctaatgtccctataactatttctgcatcttcttctgcatctataatataccaacattcagatttgccatattgcccgttttcatgctcataagcataagaattatcagggtgcacatgaatagaaagtgattctcttgcatccactattttagttagaagcggaaaatctttgcttgggaaatcaccaaacaattcacgatgttctgaccaaatacggtctaatgtttgaccttgatatggtccattaataatctcgctcgtaccatttggatgtgctgacacacaccaacattccccagttgtatcattgtctaattgatatccaaactcacttagacgttgaccgccccataattttgtttttaaaattggttgtaaaaataatggcattgttgcacctccattgtgattaagtaagcaatagaactctgatgttgttgttccattatattttgattttgttctcatttacatcgtattattaacttccacatttcaaattaactattagtgattgtaccatatttactaacattgcagtactgccaattaaagcgcttcacttaaatttacagtactttaacattttcaaaaatttatagcatagagattatatctctcttacatttgtacatatttccctttaaatttactcgcccattataccaattaataaacaactttaatagttgtgccatacattgttcaaattctttgtaaaacgcatagacaatacgtacttattcatacttataattcatcattttcaaaaaataacgagttacgaaaaagtaacccgcttcaaatcatatttactatccttattaatccgtttcattttcaaattgagttaaagcatctttaatgtcctgatcaccactaataatttgaaactcttggtgattaaaatgattggatgtgacaatttcttttaatactgtcgcaacatcttctctaggaatttcacctttaccatcaaaatattgtgcagcttctatctttccagatcctgctgcatttgtaagtgcccctggatgtaaaattgtataattcaaacctgaacgtcttaaatagtcatcagcgtaatgtttagctattgtatatggctttaaatcaccgctatcatcaaaagcctgacgtctcgaatcatatgttgaaaccatgacatagtgtttaatattggcctctttactcgcaatcattgatttaacagcaccatctaaatcgacaataattgttttatctgcacccgtgttccctccagaacctactgaaaagataactttatcgaatggtttaaacgtctcagttaaagtctctattgaatcattttcaacatcaacgagaattgctttcataccttgtgattttaacgcattaagttgatctgattgcctaacaccagcagtaaatggtacattttcttttgctaattgttgcactagtaacgaacctacaccgccattagcacctataaccaaaatattcatttacaacactctcctatttattattctctatgccataccactttatgagatatgtaaaacttgttacaactataaaaatcaattgacatactactgggaacgtattaaattaatatatgaacaaatattcatatgaaaggattgtcatataatgtcagaacaatattcagaaataaatacagatacattagaacgcgtaactgaaattttcaaggcattaggcgattacaatcgaatacgtatcatggaattgttatcagtcagcgaagcaagtgttggtcacatttcacatcaattgaatttatctcaatcaaatgtctcgcaccaattaaaattacttaaaagtgtgcatcttgtgaaagcaaaacgacaaggccaatcaatgatttattcattagatgacatccacgtagcaactatgttaaagcaagccatacatcacgcgaatcatcctaaagaaagtgggttataatatgtctcattcacatcatcatcatgaccatatgcatagtcatgtaactacaaataataagaaagtattgtttatatcgtttttaataatcggtctatatatgtttatcgaaatcatcggcggtctccttgctaacagcttggcattactatctgacggtatccatatgtttagcgacacattctcattaggtgttgcacttgtcgcatttatttatgctgaaaagaatgccacaactacaaaaacatttggttataaacgtttcgaagtactcgcagcgttatttaacggtgtaacgctttttgtaataagtattttgattgtttttgaagcgattaaacgtttctttgttccttctgaagttcaatcaaaagaaatgttaatcattagtattatcggtttaattgtcaatatcgttgttgcattctttatgtttaaaggcggcgacacttcacacaatttaaatatgcgtggtgcttttctacatgttatcggagacttattaggttcagttggcgccattactgcagctattttaatttgggcatttggatggacaatcgccgatcctatcgcaagtattttagtttccgttattattttaaaaagtgcttggggtatcacaaaatcttcaattaacattttaatggaaggcacaccaagtgatgttgatatagatgaagttataactactattaaaaaggattcacgaatacaaagtgtgcatgattgccatgtttggacaatttcaaatgatatgaatgcattgagttgtcatgttgttgtagaccatacattgacaatgaaagaatgtgaattattattagaaaacattgagcatgatttattacatttaaatattcaccatatgactattcaattagaaacgcctaatcacaaacatgatgaatcgattatatgttcaggaacacatagtcattcacataaccatcatgctcatcatcacgcgcatgtacattaataattttaacctactgccattgcatcgattaaacttttcaatggcagtaggttttttatgtctttatggcgacttgtttggtctttgatgatgcaatgtttattaacaaattttcaactattatttcttacattagtcatatttttgacaatttactattataattctctaactttagtcactttaattaatttttattagatattaatatgaaaataacgtgttttttgttattgtatttatatgaagaaaaggaggcaccactttgtttacttactttaaatcagcatttaaaaatgctaaaccacaattattaataacattgatatatgcacttatagcatttgctgtaattgcagttgtatatttacttgctaatttccagcttgctaagtatgcacaaactattgcaatttattcacaatttgggcaaaaaccaccagtagatgcatatttaaaagttatcgctgtattacttatagcagctgtagtttcactgtttgttttagttcaaatttttatcggaattacaaatgttatgaaacgagcaatgagtcatgaaaaagtaaaatttaccgatttatttattgcatttaaaaaaggtaattatttaaagagcgttctgatcggtcttgtatctatagcaatgattatcgttctttcacttctgacatcattactatacaaattattttctccagtatcagaaatgattatgaattcagtacaatcatcatatgcagatagtacacacctgattggtattgctattacaactcaaagcatcataatcattgttgttttattgattaaagcaattattacttggttattgttaatacctattttcaactttatgactagtttcgttgaatcaactaacgataaagtaaaaacacacttagctaatggatttaaagcaatgaaaaatggtcaaaaaacatttttcaaatttttcattggaatactattattaaacttaattattattttatttaaaacacctgttggttacttgatttcatttaatacgcaatcactctctcaaagtgttgcagaaaatatcataagagtttatacagtaatgacaattattttattcgttgttattcatgcaatcattttaatgggtatcgttcaatattacttaaaacgtggtcaaaaaattactaaagataaagtaaaaacagctgacaagaataaaaaagttgtcactgaaccaaaaaatacaaaagtagaaaatgataaagtgacaacatctgttgaaacaaaaacagaaaaagcacaagattcattaaatgataatacaacaaaaacaatgacttcagataaaccagaagacaatcaaccaaaataaattttagagccccttacaactttagttgttaggggctcttatgcatgcgcttagcgcaggcgctcctacttttaaactttagttgttaggggctcttatgcagttgatgcgtagcatccaactgtgttcctctatttttcaactttagttgttaggggcttctttctaaaataactaagtgaattatctatatatgaagaggtctccaatactttttatataattcgtgattacattctatacttttaattgtattttctgctgtatggaaagttggttttattaattctgattatgttcagaactacaattcataagaaaaatgtgttaaaatatatttgtagtaagtagaagcaaaagatgaaaatcattaactcttgaaacacaaaaagggcaacactcggaaacatgttaccctaatgagcccgttaaaaagacggtgaccttatattttatttaaaaatagccttcaaaaatgccggtcaaagcgaatagaaggttattttttatggtcttgagtactaatcaatactaaaccaatgattgttaatacaaccataagcatttcaaaatcagacatgctagtcctttctaggagtaacaactataaccataggcatcacccctttattaagagattagccaccatctatccaacttgctcaataaatattataacatgcacacttttaaacagtaattcatagtataagttttttcatttcttaatcaactcgataaacagttgagtgacatacccttgtctaactagctatttcttcccctgttatcgtttgttcatcatataaaaatttaatttctcattttttattctctggtaaagaggggcgcccgctttttcggcctctcgctcttgttgctgctaagtctattttatacactcacatagtaaattaacttctaatcctgaaaaatgcactcatcatcgtaaaaaacattttgcccattgtgtctttcgttgaaatgttcatgttactaatttgtaagtcaattccgttatcatcgaatcattgtgataattcaattaatagttttgtcgttctacctaaccgatcaagttgatagacaactaatgtgtcgctctctcgtaaataatctaaacacttaacaagctctgtacgtttgacaccacttattctttcactatatacacacccacacccaaattctttaagtgtatcgatattaatctttcgttgatacacgatcataaccaattttagccatttaaataaaacctctcttcaacatattatatttagttatgactcaaaactcattgccgtatttttgattttgtattaatatatcaaggctatcatcatctaataccaaatgaatttctccacttcgaatatcaatagcaacgtttatttttgattctaactttttcaaataatctatgtcagtaaatatgtacttagaaagataatcatcttcttttttaaattcttctttatcaattgtatatccgttctctaaaatttttgataactctataagagtattactcctactttctttttttacattagacactacatagtttatgaacttttcaatcaattgttcttccaaatcactataatcttgtgtgtcctttttaaataattcaaacataatattattggataaattttcattatatattaatcgctcgtacataccagaagcgctagagttgataaatctattcagatcgttttgtatttcgttcaaatctatattccctttactatcgtaatatgaataattactcattaatttttttaagaaatctctcaaaccaaagtaaagataaatatttgaatactttctggcattatcgtagtcttttacatctcttttatagtgatctatcaacatattcaattcgaaattatatccatgattaaaatcaaactcgccattgtcatattttctttgaaattcaaacttgtatatttctgcaactttatcatcgcaattttcatctatatagttttcaaccaaataataagcacgctcaagagaaatttcaccataactttgtataaaagaggttaagtactctgttttctttaaaatttcttctcctttcttagttggtatatatacatatggtaaatctaagttattaataatatgaaaattgtcgtcaatacgtttaattaagtcaggtttattacctgttgtttttataccaaaactttttaaaatactttgtaattcaggtcttgtctttttatatatactaacttcaaaatcattagtcgttgttaataactcagcttcaattaatttttttattgaattcataatttgaacatcattattagcaaggcacttattagcaaatatctcttctccaaccaatctatttacattagtgtgtaatactaataaatcacgtgcatttacgctcactagctttcatctcctcatttttgcttttcaaatttattaagtatgaataaaaaatacatccgaacaaacaaaatctctatattctaattcgatttacatagattatacactaaaaaaatgattctcaatgcaaatgaatgtgtctctcatagtctaaaaactcgtatgtttcgaattttatgattcattgataatagtaccagttaaaagaactaagattgtaattatccccccttaaaattcaagaatatattttcttaatctatcagcaagaggttatatttcaaagtgtttatttttaaaacaacatctaaaagccattttcataataatgttaaatcattagaatgtataaagattccaattaataaaaatagataaaatgcaataaagttccaaatacttattattattcatcacaaattacgtgatgccctctacaacactaaatcaaggatgatatttattttatatacattagcattcattgtttgcttacccacattatcctgtttagtcttttttataactctagtcttgaatgtcatatttacaaagaaaaaaacactaaaatatttaaaactaacactatttattcactttgttcttttatagcaccttttatgtttattttcttgtattcaataaatagtatggagatgataatttaaagtagatatatttgaagtatactatagagtaaattatattggggaaatatgtaaacgaaccggttgattttatagtggattaacacttcatagagaatataatcaagaacaaaaacagtcaataggtgtgaatttttttaaagacggatctgttgctactaaaaaaagaagtatacaattcaatagttaaaccttaaaacaagaaatattattcaaaatcaatgaatttcctatcttattagttttaacaatatttattctcatagagtttgtccaattaaatatagatgattcaaatatttataagcatacaaaagagcagtaagacattttctaatagaaaataactttactgctctttgtacattactcatcaactattgtaaattaaataataaataactacctattttattattcagctaaaaaatgctctgctaaatattttgctgcgccatcctcttcattcgtgtatgccgttacatctgaagttaatgcttggatttcagggcgtgcatttttcatagcaactgtataatgaccaaattcaaacattgctctatcattgtcgctatctccaataactaacgtttcttcttgatgaataccaaaatgtgcaatcatttctttaatgcctgtacctttatcagtttgataagccattgtttccgcattaaatcttgatgaatttgaaacactaatctgtagttgcacatgattttgctttaattcatctctaaatgctgttattttttctaaattagaactgaatagataaatttttgaatattcaccttcaggaaacttagttacccaatctatcttaccagcaagcgcatcttgtcttgaagaccattcactatgacttacgccattaataggatcttgactacgaatcatatctcgcatccatgtttcatcttcttttaaagaaactctattaccttcaaaaggaaatacctcataataaatttgttggcgcttagctaaattagtaatttgttgcacttgagccaatgataaaccatgcttgaagataatttctccatctacttctccaattgttccatttgaactaatgatgccattaaccgcaaaatcttgaggtacaagttgatgtatttcagaatgcgaacgtcctgttgccaaaaatactttatatcctttctctctcaattgattaatgacatctttcgtatacgttgatgcttgattattttcatgtaaaattgttccatccatgtccaaaaatattgcttttacgttatccatattgccctccactgtccattttatcttaattaaattttgtcattattacttattatttgcaaaatatttactctaacattgccatagaaaatcgattattccatctttgaactgctacatttttctggaaaaatcgtgacatgttttcagaagttaatatgtcttctacagcgccttgttgaatactttggccatcttttagcagtaaaattttggaaaagttagcagttatttcttcaataaagtgcgtcacataaatcatcgcaagcgttggatatgaatctgacaatgagtcaagtatacttaacaacgattctcgtgcaataaagtctaaaccagctgctggctcatctaaaattaaaacctggggttgccccattaaagctcgtgcaatcatcactcgttgtttttcaccggtagataaataaccaatatattgttgcgctttagcaaacattccaactaatttaagtaattgatgtgcttcattacgtatctcatcatcaatatcttgataaacaccaattgatttaaaggcaccgcttatcaccacatcgattactctttcaccctcttgaaacttttccagtaaactatgagatacaaaacctatatgttgtcgtacagtctctgcagaataccctaccttgcctggcattttaccgaaaaggttaacagttccagatgttgcaggctcatacgcatttaaaatatttagaagtgttgtcttgccagcaccattcaacccatataatatccatttatcacctttagcaatttgccaagaaatcttttttaaaattgtttttccttgcttcattcgcccaatttgatctaattgaattaacatgcgaggtcacccctttattgctactccatacttctcataaaatcatattaacataacacccttaattgtcagactatttaaataaataaaacacttcatttttacgcatttctgccaaattaagatgaagtaaaagctaagtcgacctaaaaaagcacccttctagtcgattaatctaaaagggtgccatatactttaattttaatacatgattgattctaaaaaagtgaattattccacagtaactgatttagcaaggttacgtggtttatcaacatctaaatctctgtgtaatgctgcatagtatgaaattaattgtaatgcaaccactgatactaatggcgttaacaattcatgtacatgaggaatgacataagtgtcgccttctttttcaagaccctccatagaaataatacatggatgtgcaccacgtgctactacctctttaacgttaccacgaattgataaattaactttctcttgtgttgctaaacctacaactggtgtaccttcttcgattaaggcaattgtaccatgtttaagttctccaccagcaaaaccttctgcttgaatgtaagaaatttctttaagttttaacgcaccttctaaacttacgttatagtcaatagtacgtccgataaagaatgcattgcgtgttgtttctaagaaatctgtagcaatttgttccataattggtgcatcgtcaacaattgcttctattgctgttgttacttttgctaattctctcaataaatcaatatctgcttcacgaccatgctcttttgcaacgatttgagacaagattgataatactgcaatttgtgcagtatatgcttttgtagatgcaactgcgatttcaggacccgcgtgtaataacaatgtgtggtctgcttcacgtgataaagttgaacctgcaacattagtgattgttaatgatttatgacctaatttattagtttcaactaatacggcgcggctatctgcagtttcacctgattgagaaatataaacgaacaatggtttttcagataataatggcatgttgtagacaaactctgatgcaacgtgtacttcagttggtacgccagcccatttttctaaaaattctttacctactaaacctgcatggtagcttgtacctgctgcaataacgtaaatgcggtctgcttctttaacatcattgatgatgtcttgatcaattttcaagttaccttctgcatcttgatattcttgaataatacgacgcattactgctggttgttcatgaatttcttttaacatgtagtgtgcataaacacctttttcagcatctgatgcatcaatttcagcaatatatgaatcacgttctacaacgtttccatctgcatctttaataataacttcatcttttttaacaataacgatttcatggtcatggatttctttatattcgcttgtcacttgtaacattgcaagtgcgtctgatgcgataacattgaaaccttcaccaacacctaataataatggtgatttatttttagcaacatagattgtgtctttgtcttcagcatctaataaacctaatgcatatgaaccatgtaataatgacacaacttttgtaaatgcttcttcagttgaaagtccttgatttgaaaagtattcaactaattgaacgataacttctgtatctgtttctgaaatgaatgatacaccttgtaagtattcaccttttaactcttcatagttttcaataacaccgttatgaactagagtaaaacggccatttgatgattgatgtggatgagagttttcatgattcggtacaccgtgtgttgcccaacgtgtgtgaccgattccaacaggtccatcaaaatcgctactatcagcaactttacgtaattctgcaatacgacctttttctttaaatacagttgtattatcatcatttactactgcgatacctgcagagtcataacctctgtattctaatttttctaaaccttttaataataattctttggcattatcatagccaatataaccaacaattccacacataacgacattttcctccatattggaatagtacgcgtaaattatgatttattgccgataatttagattgacaatctgctttcataatataaataggaacatgctatcatcgcattcatccataacaaattaagcatagttatttttacaactatacaaattgctcacactgtactttccatattaatattttttatattcaatttctggcgatcttattaactttgtccattaagtcaccctaatgttttacttaataagctaacgaatgagccacatccgggatagcatccgccgatctattcgatcactatcctcctcgtctacaaatacatatattgcactctataaaggccactcatatattaacctttaatcttcaaatacaaatatttatttgcacaggcgctttaactgtactgccgaactttccccctttccattaatcattattgtacaacggtgttgttttgttttgcaaatattttcacaataaaattttaaaaatcctaaaacaatttttttgttttactttttcaaaatatctatactgtcacattgatgacactttatttaattttgtcacatttattttgacaaagttgatttttgtttatattgagtaacaagtaacctctctatacactatatatagtcacatatattaaaaaagaggtgtaaacatgtcacaaactgaagagaaaaaaggaattggtcgtcgtgttcaagcatttggatcattcttaagtagtatgatcatgccaaacattggcgctttcatcgcttggggttttatcgcggccatttttatagataatggatggttacctaacaaagatttagctactttagcaggaccaatgattacttatttaatcccattattgatcgcatttagtggtggtcgtttaatttatgatttacgtggtggtatcatcgcagcaacagcaactatgggggtcatcgttgcattacctgatacaccaatgttacttggtgcaatgattatgggtccacttgttggttggttaatgaagaagaccgaccaattgattcaacctagaacgccgcaaggttttgaaatgttatttaataacttttctgctggtattttaggatttatcatgacgattgcaggatttaaaattttagcaccacttatgaaatttattatgcatattttatcagtggcagttgaagcattagtacatgcacacctacttccacttgtaagtattttagtagagcctgcaaaaattgtatttttaaacaatgcgattaaccatggtgtattcacaccgcttggtgcagatcaagctgcaaaagctggtcaatcaattttatacacaattgaatctaaccctggaccaggtttaggtatcttacttgcttatatgatttttggaaaaggcactgcaaaagcaacgtcatatggtgctggaattatccacttcttaggtggtattcatgaaatttatttcccatatgtattaatgcgtcctttattatttatcgctgttattttaggtggaatgactggtgttgcaacttatcaagcaacaggatttggatttaaaagtcccgcgtcaccaggttcatttatagtttactgtttaaatgcacctagaggtgaattcttgcacatgttactcggtgtcttccttgctgcacttgtatcattcgttgtagctgctttaattatgaagttcactagagaaccaaagcaggatttagaagctgcgacagctcaaatggaaaatactaaagggaaaaaatcaagcgttgcttctaagttagtatcttctgataaaaatgttaatacagaagaaaatgctagtggtaatgttagtgaaacatcttcatcagatgatgatcctgaagcgctattggataattacaacactgaagatgttgatgcacacaattacaataatataaatcatgttatttttgcctgcgatgcgggtatgggttctagtgcaatgggtgcaagcatgttacgtaataaatttaaaaaggcgggcattaatgatattacagttacaaatactgcgattaatcaattgccaaaagatgctcaattagttatcactcagaaaaaactaactgatcgtgctattaaacaaacaccaaatgccatccatatttcagtggataatttccttaattcaccaagatatgaagaacttttaaataatctaaaaaaagatgatcaagcataataattaaataaattaaaaaatggaggataccgccatgttattgagtacacgtgaaaaagaaatgatagccctattgattaagtaccacggtcaatatatcactatacacgacattgctcagcaacttgcggtgtcctctcgtactattcaccgtgaattaaaaggtgttgaagcatatttaacttcattttcattaactttagaacgcgcaaacaaaaaagggctacgcattgctggcacagattctgatttaaacgatttgaagcaatcgattgcacaacatcaaaccattgacttatctgttgaagagcagaaagtaattattatatacgctttgatacaagccaaggagccagttaaacaatatagtttagcgcaagaaattggcgtttctgtccagactttagcaaagatgttagatgatttagagcttgatttaaataagtaccaactatctttatctcgaaagcgtggcgaaggcatttacttggtaggtactgaatcaaagaaacgtgaatttttaagtcaattaatggtgaataacttaaatagtactagcgtttattcagtaattgaaaatcattttgtctttcattcattaaatcaaatccacaaagactttgttgacttagagcgcatttttaatgttgaaagactattaatggactacctaagtgccttaccctaccaacttaccgaatcaagttatttaactttaactgtccatatcgtgctctccatttcacgtataaaaaatggagagtatgtcgcattaaacgatgatatttatgattctgtacaaaacacatttgaacacaaagtagcaagcgaacttgctgataaacttggtcaaatatatgacgtcacgtttaatcaggcagaaattgctttcattactatccatttacgtggagctaaacgaaaaaatcttaatgatacatcattaaataatcgttgtgaagaaaacaaaattaaagcgtttgttaacaaagtagaaatgatttccggtatgacatttgcagatttggatactttagtagatggactgacgctacaccttaatcctgcaatcaatcgtttgcaagctaatatcgagacctataatccgttaacagacatgattaagttcaaatatccaagactatttgaaaatgtaagattagctttaaatgattgttggcctgatttgatttttccagagagtgaaattgcttttatagttttacactttggtggctcgattaaaaaccaaggtaatcgatttttaaacatattagtcgtttgcagcagtggtatgggaactagtcgtctattatcaactcgtctagagcaagtttttagtgagattgagcgtattacacaagcatcagtcagcgatttgaagtcactagatttaagtcaatatgatggcattatttctactgtgaatttagacatcgactccccctatttaacggtaaacccattattaccagatagtgatatcagttatgtcgcacagtttttaaatacaaagtctacgttccaagagacgcatgataaatcatcaaacatgattgataaggatgatgttcatgttgaaacgaaagatgttgatggcaacacatcttttgaaaatgaacaaacttcatacttaacttcagttttcgaaaaacatttaagtgacgaaaaatcagaacaattattgcatcatatgcgttcgggtttaactttgcttgattcagtgaaaatagttagtaccgaagttaaacagtggcaaacatatatcgcagattatctatatcaatgcgatgtaataaacgatccaacgtcattcgctgaactactagagcaacgattgattgacaatccaggatggatattaagtccatatcctgttgcaataccacacctaagagacaatatgattaaacaccctatgattctaatcacagttttagaagaaccgttaacattgcctagtattcaaaatgacaatcaaacaattaaatatatgatttccatgtttatttctgacaatgattttatggcatcactggtaagtgacttgtccgaatttttaagtttgaaattagaatctattgatacttttatggaaaatccacaggaacttgaaacattattaagaaacaaatttttagaacgaattaaaaaacaatttatttaggagtgtacaaaatgagcgaattatttagtaatgacaatatctttttaaatgtaaatgttaacagccaaaatgaagcaattgaaaaagcaggtaaagccttagttgatagtggtgctgtaacagatgcttatattcaagcaatgaaagatcgtgagcaagtcgtatcaacatttatgggaaatggcttagcaattcctcatggcacagatgaagctaaaacaaatgtgattcactcaggtttaacattattacaaatccctgaaggcgttgactgggatggcgaagtagttaaagttgtcgtgggaattgctggtaaagatggcgaacatttagacttgttatctaaaattgcaattacatttagcgaagaagaaaatgtggatcgtatcgttcaagcaaaatctgcagaagaaattaaacaagtattcgaggaggcagatgcataatgaaagcagttcactttggtgctggtaacataggtcgtggtttcattggttatattcttgcagacaacaatgttaaagtaacatttgcagacgtcaatgaagaaatcattaatgctttagctcatgatcatcaatacgatgttattttagctgatgagtctaaaacaacgacgcgcgtgaataatgttgatgcaattaattcaatgcaaccttctgaagcgttgaaacaagcaattctagaagctgatattattacaacagctgttggtgttaacatactacctattattgctaaatcttttgcgcctttcttaaaagaaaaaacaaaccatgttaatattgttgcttgtgagaatgctattatggcaactgatacattgaaaaaagcagtacttgatattactggccctcttggtaacaatattcattttgctaactcagcagttgatagaattgtaccattacaaaagaatgaaaatatattagacgttatggttgagccattttacgaatgggttgttgaaaaagatgcatggtatggtccagaactaaaccatattaaatatgttgatgatttaacaccatatattgagcgtaaattattaactgtgaatacaggacatgcatatttagcgtatgctggtaaatttgcaggtaaagctacagttttagatgcagttgaagatagttcaattgaagctggcttacgccgtgttttagctgaaactagtcaatatattactaatgaatttgattttactgaagcggaacaagctgcttatgttgaaaaaataatagatcgtttcaacaattcttatttatctgatgaagtaacacgtgtcggacgaggtacattacgtaaaattggccctaaagatagaattataaaaccattaacatatctttataataaagatttagaacgcactggtttattaaatacagctgcattgttattgaagtatgatgatacagcagaccaagaaactgttgagaaaaataattacattaaagaacacggtttaaaagcgtttttaagtgaatatgctaaagttgacgatggcttagccgatgaaataattgaagcgtacaattcactttcataatttattgagctttgtttgaaacaagaagtttccaacgttattcgttaacaatcagtaataatgtagtagttcccttgaattaacaatattaaatttctgaacataaaaaatactcccttcaacatagacacttaacttgtgttatgtatgaaaggagtatttttgcgttaataatttgttttattttcgagccacagccacctattcaatggctattggtcattactaaaacaaattcatattaactgttagacttggttacttagtaaggaatatttccctatgaaataactagatgttcacattcttgaataaattttattcttcagtttgttggtctttcttagtgaatcttctaattaagaatgccatacctgcacctagagctaattcagcatatggtaaatcgtcattatgtgacataccagtatctggtaaagttttagcttgttgtttagctttattaacttttccttgttgagctgattttgtcttagcttggtggtcgtcagtgttagttacattaagcatatcttgattagcactattgcttccatttgaaactgtagctggagatgcattggcaccgtcgttttgcgtagctttattgtttgcagctgaaccaactgatttttgcgtatcattagtatctgctgttgccgtatcatctttttggctaacattagttgaagtcattttttcttttgcttcagaagatgcagatgttgatggtttattcgaaacttcagtatcagctttgcttggcgatttatctgcttcgttagatgcaacgttagtttcagacttaagttgtcctgcatcagtttgatttgtcgtactttcttctttatcttttgatgtattagaaggtacatttggttctgttatgtctgctgaaggcaatgtttcagttgttgattcaaccatactttgatttgttgaatcactaccatctttttctgccttagctttattttcagattttggttgtgcaaccttgtcattagttgattgagattcagcactattatttacttcagcattttgttttgaatcatttacagatgcattatctttgctatcagcagatgatgctgcttctgtgctcgcagttgttggagccgttgctgttgatcctgttggtgcattctcgtttgttgctgtagttgtactattgttatttgttgtgctttctgctggcgttgcattatcagtttctgttacaggtttatcagttgtgccgttattagttgattctacttctggtttactagttacatcgttatccattgtcggactgtttgttgatgcatctacactagaattgttattagcttgcggtttatcatttgcatcatcagttgctgatgttgctgttgtttcacctgttgccgcatcactattatttggtgttgtcggagaagcgtctgctttgccattagctgtcgtctcagatacgttaggttgtccagtattttctggtgttgcattagcatttgaatttgctgttgcatcattattatctataccattattagtatcattagcatctggatcattctgaggcacaatcgcttcaattgcaggtatcgttacattttgtaattcagcaacttctgcatttgtttgtgttttatctaatttatcagcaaatctgtcaaaatatctacctaaatccgtacgtgcaatttctttcgccgatgcatctgcatctgcatttttaattatttctatttgcttgttaaccacttctctgattgcttccaaagcatttttcttaacttcaggattaatacgttgtgctttaagttgttcaagcgcactatttttgacagtagcgatttctgcatttgtagtttgatcagaaatatcttcagttgcttttgataaaatgtcttctaaagcattcgtaaacgcttctttttcttcagttgtagcatcagcgttgacatttacacctgcttcaatctggtctagtgcagtttctaattcttcgatagctttttgtttttctgttgagtcgatttgaatgttatcaaatgcttcaagtccttgagctttcgctttttcaacttcagcagttgttgttgcatcagtaataccttgtttagcttgatctgtaatttgtttaatcattgctaatgcttcagttttttcttcagcagttaactggtcactttgatcaatagattctttcgtatcttctgctttaacttcaatagcttggttcgctttaggtttaacagtagcatctacttgaatagcatcaattgctgctttaccttgtgttaatgcatcatcaacgtcaccattatccacaccattattaatgctttctaatgcagtttgaacattttggtcaacttgcttaattgcttgttgcttttcatcttgtgttgcattagtgtcagctgaaatattatttttcttctgatctgcataagcatataaatctgttgtagctgattcttttttacctgttggaattgtgtaatcgttaatattatctaagtcattatgaatttgaacttcaatgtcatctttagaagtagcttgattaacattttgatccgcagtttgttttaattcagcaagtttttgtttcgcttcagcaatttcacttgaagtcgatgcgttagagttatccgcttcgtttactttagcattatatgcatcttcaattttagctaaagcatcttttttgtactcactaaatgttttaactgcattaattttagcttttccttctttaactgcattatcaacatattcatttgttgatgattgatcgacatttgttttcgcttgatttaattcagtatcaacttcttgttttgcatcattaatttcttgttgtgatgcatttggtgtttgttctatttgtgttttcttatcagctgcagcttgatctaattcttttttacctgctggtttcttaacaggatttgcatgaagttgttgaactttttgtactgctgtatctttagcagtagttacatcacctgtagtagttgctgcattaatattatttaaaccttcttcatatgctgctctaactggtccaatatcgttacctttttcttcattagtagtctcattattattaagtatttcagttattttattttgcatttcagttagcaattccgctcttgcattcgttttaacatctgttgatgcttgaattgggtcaattgcttgaattgcattatcttttgcagtgtttacatcatcgattgactgtgcattttcaatattttgattaccttgtgttaattgtgcgtctacttgttgatttgcttgttctttttcttcagtagtcgcatctgcagtttgtgcaataagcgctttttgttcgtttgcttttgttgctaattcatctttcgcaacatctttaattgttgtatctgcagtaataccttgaatatcagcaactgcttgatctttaatttgcgtaacatcattagttgtttgtgcatttaagatatcttgatacgctttttctttagcttttaaaactaaatcttttgctgcatttttctcttcagttgtagcaccagttgtattatcaattgcttgattttgagttgtcacagcttgatcaacatcatttttagcatttgatttaaccgctgttgctggttgcgtgctttgaattgaattctttccagcgtctttcgcctgatctacaccattatcatcagttgcagctgtaatattatttttcgcgtctgtaactgctgttgctaattgttgaatagctgcttctttttcttctgttgtagcgttctgatcattattgataacatttgtttgcgttgcttgtaattgatcaatttcatctttagccgcttgtttcttcacaacttttggtgttaccgcattaatcgctgcttctgcatttgctttagcttcatcaacttgtgcgttagtagttgctgctgaaatggcttgatttgctttaccattttcagtatttgcttcagcatcagctgcttgtttttcttcatctgttgcatctggcgtagcttgaatctcttgcaatttgttatttaaaattgctgtgatttcattacgtgcagttgcttttttattaactgttggtgttacttgatcaatactattttcacctgtcgttttcgcttggtctacatcattttgactattagcagcttcaatgttgctatttgcttgtgtcacagcattatctacgtccgcattagccgctgcaatttcttcagcagtaatgtcttgcgtttgagcgattgctgttttacgttcattcgctttcgtagcaattgcttctttcgcattatctttagttgttgttgctggctgaatcgcttcaattttagcaattgctgcttttttagccgcttcaacttccgcatttgtatgtgctgcatctattgcggcatcagctgttgttttttcagtttgaacttgttgtttagcagctgctttttcttcagttgttgagccgttatttccatcaattgctgtttcttgagcttgtactttatctgcaattgcttgttttgctgctggtttaacatttgcatcaggtgtaatggctgcgattgtagcttcatttgtagtttttgcattatccacatcattgtttgctgcagcattatctatatcagcgtttgcagtaactactgcttgatccactttgtctttcgctgcttgttgttcttcagtagtcgaatcattcattgcttcaattgctgttttacgttcacttgctttttgagcgatttccgcttttgcatccgatttcttagttgtggcagcttgaacttgattaattgcagcaatactattgtctttagctgttgttacatcactgtttgtatttgcagcatcaagatttgttcttgcttcttgctttttagtatctaattctgtatatgcagcttgtttttcttctgtagttgaagcattgctattttgaatttcttgtttacgtgtattatatgcgttttctacttccgtatcagctgcaggtttaacttttgcttgtgtttgaattgcattgattttatctaatacttttgattttgtatcagcaacttcctgttttgatttaacaacttggatgtcatgtaaaccttgcttttgagctgcatctactgctgcatcagcttctgatacttcttcatttgttgcatttgaaactgtagcattttgagcttttctagctgttgcagcttgtttaacttcattataggcatccatttttgtttgcgtagagtcagtaatattttcaatttttgagatttcttcgtttttaactctttctaaatcttgtgcagtcgttgtcgcttcaattgctttaacaccagaaactttagctgcattaatacgttcaatagcttccgctacttcttcatttgttgtatcaggatttaaaggtgcttgatcaatttgtgcttgaacaacttcgtcaaattcttcaagagctgctgctttagctgttgtagcaggtgtagtttgattaatatcattgattgcttttgttttaatggcttctacttgtgcatttgttgttgctgcatcaatatctttaattgcctttgtttcaattttaccaattttatcatttgctacatctttttcatcttgtaatgatgcatttgactttttaatttgttgtttacgagttgtaactgcttggataatatcttgtttcgcttgaggtttaactgttggtgtaatcacatcttgttctaacactgcgataccattatctttttcagttgtgacaccttgtgctgtagtttgtttattaatttctgcgattgcattatttttatcattgttaattttagttacaagtgctgcaacttcatcttgcgtaacttttttactttgttgtgctgctgtaaccttttcttgagctttagtatctaattcagcaattgctgcttgattatcaattaatgcagcttgtaatttagttactaaaccatcaatatccgcttgagatgcacgatttgcagttttaacatgattcgcatcttcatttaaaatagtatctgcttgttgtttaagtttattgtattctgcaattgatgctgttgtgtaatgactattatcaacttgtgagtttacttgttgttgcaacgcatctttgttcatttcaaccgctactgaaaatggatctgcagttagtgtaacttctggttgcgcattattaattacaacatctgaagcagtacgatatgttaatttttcattaaaatcaatatttttaggtgtatcgatattcgcaacattaactttatatgataattttaaagatttatctgggaataaaacttctttagtgtgtgtaccacgtgccgttgtcacaccttggcttgtaaatgtaactttatttgcattttgatcataattaacagtcatatttttcaatactgtactgtcttcattaccattagggaatgttgtagttaatgaattattaacgtaagttacaccttgtggtaatgttacttcatatttaaattgatctgcttttaatgaagcaccaaaattaccattgttaccgatttcagtattaatagtatattctttattgttagttgctttcggtgctaaatctctatttttgacatataaatgtgatcctgagaatagacctacattatcaatgaatgaatagtatttataaccatctttatttgttgtaattcttgaagcatcagcaactgctgtattgtcaggaataaattgtaaatctaaacgatcagcatcagttggtactttaaataaatgtgcagtaccagtcttagcaacatttacagttgctaattcagtatttttcttagcatctttaataactaaatttgttgcaccttgcttactattcgtttgcatagtagtaaagttaataattaattctgaatctggttttacatttacagtttttgaaataccgttaaagttaccatgatctgtagaatcatttgcattcacacgacctaatgcagccacgtttcctttagcttgatagttttgagggttattcttatcaaacatatcgcttcgtcttaattctgagttaacgaaaccaatcttaccgttgttaattaatgaataaccatttactttatctgtaacagttacagttggatcttgtctattctcatctgttgatatggcaggatcatcaaatgttaatgtcgtattaatactgccttcaccagtattgctagcatttggatcttgagtttgtgcgtttgctgctacaggtgctgctggttgcgctgctgctggagcattcgctggctgtgtttgatttgccggtgttgcattattattaggtgttgcttggttatttccttgacctgcttggtttgccggtgttgcttgatttccaggttgtgcttgtgcagcgttattcggatcagcttgattaccttgtccagctggttgtgtatttggttgtgctgctcctcctgctggattagcctgtccaccttggtttgctggttgtactgctggttgtccttggttggcaggtgcagctggctgtgctgtaggattagcttgagcaccagcatttgcgttaggctgtgtattggcatcagctggttgtgctggttgattttgtgcaggctgattttgctctgctgcagacgctgttgtcgggttagtagatataaaagtaacagtggcaattaaagctgaaaaaataccgacattaaattttctgatactaaatttttgttgtctgaataaattcattaagtcatcctcctggttgattattctcgctgttaaatgatttcacttaatcaactgttaagataagtagtagcatctgcgttaaaaacacaaagcaactctatctaattaaaattaattttatcatcattatatattgagtaccagtgtattttatattacatattgattactttgtttttattttgtttatatcattttacgtttgtactataaattatttctacaaacacaaaaaaccgatgcatacgcatcggctcatttgtaatacagtatttatttatctaatcccattttatcttgaaccacatcagctatttgttgtgcaaatctttcagcatcttcatcagttgctgcttcaaccatgacacgaactaatggttctgttccagaaggtcttactaaaattcgaccttctccattcatttctacttctactttagtcataacttctttaacgtcaacattttcttcaacacgatatttatctgttacgcgtacgttaattaatgattgtggatattttttcatttgtccagctaattcacttagtgatttaccagtcatttttattacagaagctaattgaataccagttaataaaccatcaccagttgtattgtaatccatcataacgatatgtccagattgttctccacctaagttataattaccgcgacgcatttcttctactacatatctgtcgccaactttagttttattagatttaattccttcttgttcaagcgctttgtaaaaacctaaattactcataacagtagaaacaatcatgtcattattcaattcttgatttttatgcatttcttgaccaataataaacataatttggtcaccgtcaacgatttgaccattctcatctactgctatgattctgtctccatcgccgtcaaatgctaacccaaaatcactttcagtttcaactactttttcagctaatttttcaggatgtgtagagccacatttctcattgatattatatccatcaggactacatccaattgtttcagtatctgcttctaagtcaccaaataagaatggcgctagtgatgatgttgaaccatttgcaccatctaaagcaattttcaaaccttcaaagttaacatctactgttgattttaaatagctcaaatatttttgtgccccttcaaagtaatctgaataatgtacaatatcattgccaactggtcttggtaattctgggttttcttgatccaataatgcttcaatttcattttcttgttcatctgatagtttaaaaccatctgatccaaagaatttaataccattatctgcaactggattatgagaggctgaaatcattacacctaactctgcacccatatcgcgtgttaaatatgcaacacctggtgttgaaataatacctaatcgcatcacttctgcaccaattgaaatcaaaccagctattaatgctgattctaacatttcacctgaaactctagtatcgcgacctacaagtacacgtgggtgtttttcacctttattatgtgctagaacatagccaccgtatcttcctaatttaaatgccaattcaggtgttagttcttggtttgcgacacctcttactccgtctgtaccaaaatattttcccattgtttactctcctttaatttagctatttattttacatttatataagccttcgtttcacttggttgtgctttagtgacatgttctggtaaattgatttttacagtcttttcagttgattctgaaataccatctaaatctacttctgcatcaacttcgcttatattttgtaagtcatctcgactaccgaagatttcaatttctttatcttctaaatcaatcgaacttaactctttatcatctgctaaactacctttctgtttaacatttactttaacctttttgctaaaaggctctactttaacttgtaaattcacttcattaggttgaatcgatacatttaatttattcagttttttatcaaaagccgttacttctgcgacatcttttgtgtcaccattaatctttttattagttttaaaagtggcttttaaataagcgatatcattcaattgttcttctccacctgttactttaactgtttgtggtgaaacttcttgctttgtaattttataaagtggatcaatatcactctgacttacatcaggttgaactgtcatctttttagttactttgttttcaagcgtaatatttgctaatttaggttttacagaataatgaatgtcatcagctaaccctttaacttgatacttctcttgatattttccagctttagcatttgataaatcaatcactactcttaaatcttctggattttcaatttttattatctttgattgtggtcctgaaatagtcacattaactgtttcaggcgcttttgttaaatgcaaatctttagtgttataaagaatttcaacgggtacatcttgaatcgttttactagacttttgaccaagattaccagtgttaaagatatttccaaaaacattgttaacagataaaaagaaaaacaatgccaaaagaaaggcaataaatctcaagccccatttactttctagcatattatttcacacctttcttttgaaagcgtgtgccaaaccaatgttcagcaagcaactcttcaaaaatttcgtttgaaatgtctcgtcgtaattttccatcaaatgttaccgaaatatcaccagtttcttcagatacaataacggtaaatgcatcagatacttctgaaataccaaccgcagctctatgtcttgtacccaaacttttagatatcttaggactatcagacaatggcaaataacttgctgctgctgcaatcttcgtgccttgaataatcattgcaccatcatgtaaaggtgtgttaggtataaagacattaattaaaagttcttgcgaaatatttgaatccattgcaatacctgtttcaatataatcttgaagacctgtttctttttcaaagacaattaatgcacctatacgtcttttagccatatattgcacagcctttgaaaccgattgaatcaatttctcttcatctttactatacgtattagaagtatagcgttttaaaaagctacctctaccaagttgttctaacgcacgtctaatttctggttggaatattactattaaagctaataccccccattgaataacgatatcgaataatttagatgttgcagtcaagttcaatatcatacttatctgctgaccaataacaattactaatatccctttaagtaattgtatcgctttagttcccttaaagaccgtgatgagaagataaagtacataccaaactatcagtaaatcaaggatactcgttacaatttttaacgtactgaggttttgaaaaaagttggaaaaatccataacatctcctccgggtaatatttttccataatacccattataccaatcatttacatcactgtcatacgaacatatatttaaatagaaaaaatttattttaaagattataactactcttaatcattttagtgaattaaaaaaagtagtgcaaaaagcaaaatatactttatacactacaaatcatttatttataataaagtttcaccaaaaaatgttccaactaatgaaaccgcttgttcagcagtatgattattactgtcaatcaatggatttacttcaactaaatccattgaggaaattaaatgtgattgatgcagtaattccaatgcaaaatggctttctctataactaagaccacccaaaactctagtaccagtgcctggcgtttcaagcggatctaaagcatcaacatctaaagataaatgaacgccatcaacattgcgtgacttcaaatattctattgtattttcaattacttcctttatccccaatttatcaatatctgacatagtaaatgttttaatattatgatctttgataaattgtctttcacctttatctaaatctctcataccaattagtacgatgttttctggcttgattacattactatttaattctaaaagttctttgggaccttcgcctgtcaaaatccttagaggcataccatgaatatttccacttggtgactcttcaggtatatttaaatcaccatgtgcatcataccaaataacacctaaattattataatgtttacttattgctgatactgaacctaccgcaatagaatgatctccaccaagaactagaggaaatctgttattttcaattgatgctgaaacctctttatttaatttttgattaacatctataatttcatcataatttcttaatcctttttgttcactatgaaatttttcaatgttcacagcaggtaccttaatatcccccttgtcatatacatcaaggtctaattgctttaatcttgaaattaatccagcatatctaattgctgttggtcctaaatcaacacctaattttctttgtccaaatgttgatggtgcacctataatatcaattgcttttgtctttgtcataagcgtccccctttgctctatgtaattaaagaataatgtatgcgcttaccattatcaagcaatagctacacatataatctgtttatcttattacttcataaaaaaaggttcttcatcttttatggtgggaaggtaaaacttcctgctttttttaatacacaaaaagcgcaattgcctctataatttaaagtgaccaaacccaaactaaaggagacaagtgcgcctatgtgtaatgataccttagaattactaagaataaaagatgaaaatataaaatatataaaccaagaaattgacgtcattatcaaaggaaaaaaagcaacagtggttaatgctgtactaacgtataagccttcggcctgttattgttgtggagttaaaaatgaaggacaaattcataaacatggtaagcgtgtttctcgtattactttacttaaaactcaagggtataacacatacctcaacttagctaaacaacgttttaaatgcttagaatgcaatggcacttttactgctaaaacgtcaattgttgatgagtcgtgttttatctcaagatgtgttactcaaaaagttatagaagaagctactaaagttaaaacagagattgatactgcagaagataactgtatctctccatctactgtaagtcgtattagaactaaagcggctaattcattacgaattaaaccctttaattgtttgccagaacacatcgctatggatgaatttaaaagcgttaaaaatgtaactggatcaatgagtttcatttttatagataatgatactcatgatgttatagatattttagaaaatagaactacaagattcttgcgtgcctatttcgagcgattcgatttaaaaaatcgacaacaagttaagacggttactattgacatgtatgaaccctatgtccgattatttcgcgacctatttcctaatgcagctattatttttgacagattccatatcgttcaacatttaaatagagaacttaataagtatcgtgtacaagttatgaatgaataccgtaataaaaaaggacctgattatacaatttttaagaataactggaaagtcctattgatggatactagtaaaaccatatttagtaaatacagatggaataaatcttttaaggcttataaacgctcatctgacattgtagaattcatgctttcaaaagacgatatactacgacactcctacgaacttgtccaaggattacgaaaagacctaaggttatgtaattggcctaaatttattaatcgtttaaattcagttagtaaaaagtctgtgagtaagggtgtatggaaagtggttaaatattatagaaaacatcaaaggatgttaagaaatacaatttattacccagcatttaataatggtgctatagaaggaattaataataagataaaattaatcaagtgaatttcttttggttacagaaatttcaacaactttaaagcacatataatgatgattttcagcttgtacaaaggagaaaaaaagaagacaaccaagcccaataatggactggccgcctaataataaaagctctaaaagttgtattttaaaaatagttctttaaattatatacccaccacatttggtggagaacctaaaaaaaagcacttcccaaaaatggaaagtgcaagtagtgagccatagaggattcgaacctctgaccctctgattaaaagtcagatgctctaccaactgagctaatggctctaatggctgggctagctggattcgaaccaacgagtgacggagtcaaagtccgttgccttaccgcttggctatagcccaatatatagatggtggaggggggcagattcgaactgccgaacccgaaggagcggatttacagtccgccgcgtttagccacttcgctacccctccagcttattcatataatttaataatcaaaatggtggagaatgacgggttcgaaccgccgaccctctgcttgtaaggcagatgctctcccagctgagctaattctccaaaataatgactcctacgggactcgaacccgtgttaccgccgtgaaagggcggtgtcttaaccgcttgaccaaggagccatggctccacaggtaggactcgaacctacgaccgatcggttaacagccgatagctctaccactgagctactgtggattaatattatnnnnnnnnnnnnnnnnnnnnnnnnnnnnnnnnnnnnnnnnnnnnnnnnnnnnnnnnnnnnnnnnnnnnnnnnnnnnnnnnnnnnnnnnnnnnnnnnnnnnnnnnnnnnnnnnnnnnnnnnnnnnnnnnnnnnnnnnnnnnnnnnnnnnnnnnnnnnnnnnnnnnnnnnnnnnnnnnnnnnnnnnnnnnnnnnnnnnnnnnnnnnnnnnnnnnnnnnnnnnnnnnnnnnnnnnnnnnnnnnnnnnnnnnnnnnnnnnnnnnnnnnnnnnnnnnnnnnnnnnnnnnnnnnnnnnnnnnnnnnnnnnnnnnnnnnnnnnnnnnnnnnnnnnnnnnnnnnnnnnnnnnnnnnnnnnnnnnnnnnnnnnnnnnnnnnnnnnnnnnnnnnnnnnnnnnnnnnnnnnnnnnnnnnnnnnnnnnnnnnnnnnnnnnnnnnnnnnnnnnnnnnnnnnnnnnnnnnnnnnnnnnnnnnnnnnnnnnnnnnnnnnnnnnnnnnnnnnnnnnnnnnnnnnnnnnnnnnnnnnnnnnnnnnnnnnnnnnnnnnnnnnnnnnnnnnnnnnnnnnnnnnnnnnnnnnnnnnnnnnnnnnnnnnnnnnnnnnnnnnnnnnnnnnnnnnnnnnnnnnnnnnnnnnnnnnnnnnnnnnnnnnnnnnnnnnnnnnnnnnnnnnnnnnnnnnnnnnnnnnnnnnnnnnnnnnnnnnnnnnnnnnnnnnnnnnnnnnnnnnnnnnnnnnnnnnnnnnnnnnnnnnnnnnnnnnnnnnnnnnnnnnnnnnnnnnnnnnnnnnnnnnnnnnnnnnnnnnnnnnnnnnnnnnnnnnnnnnnnnnnnnnnnnnnnnnnnnnnnnnnnnnnnnnnnnnnnnnnnnnnnnnnnnnnnnnnnnnnnnnnnnnnnnnnnnnnnnnnnnnnnnnnnnnnnnnnnnnnnnnnnnnnnnnnnnnnnnnnnnnnnnnnnnnnnnnnnnnnnnnnnnnnnnnnnnnnnnnnnnnnnnnnnnnnnnnnnnnnnnnnnnnnnnnnnnnnnnnnnnnnnnnnnnnnnnnnnnnnnnnnnnnnnnnnnnnnnnnnnnnnnnnnnnnnnnnnnnnnnnnnnnnnnnnnnnnnnnnnnnnnnnnnnnnnnnnnnnnnnnnnnnnnnnnnnnnnnnnnnnnnnnnnnnnnnnnnnnnnnnnnnnnnnnnnnnnnnnnnnnnnnnnnnnnnnnnnnnnnnnnnnnnnnnnnnnnnnnnnnnnnnnnnnnnnnnnnnnnnnnnnnnnnnnnnnnnnnnnnnnnnnnnnnnnnnnnnnnnnnnnnnnnnnnnnnnnnnnnnnnnnnnnnnnnnnnnnnnnnnnnnnnnnnnnnnnnnnnnnnnnnnnnnnnnnnnnnnnnnnnnnnnnnnnnnnnnnnnnnnnnnnnnnnnnnnnnnnnnnnnnnnnnnnnnnnnnnnnnnnnnnnnnnnnnnnnnnnnnnnnnnnnnnnnnnnnnnnnnnnnnnnnnnnnnnnnnnnnnnnnnnnnnnnnnnnnnnnnnnnnnnnnnnnnnnnnnnnnnnnnnnnnnnnnnnnnnnnnnnnnnnnnnnnnnnnnnnnnnnnnnnnnnnnnnnnnnnnnnnnnnnnnnnnnnnnnnnnnnnnnnnnnnnnnnnnnnnnnnnnnnnnnnnnnnnnnnnnnnnnnnnnnnnnnnnnnnnnnnnnnnnnnnnnnnnnnnnnnnnnnnnnnnnnnnnnnnnnnnnnnnnnnnnnnnnnnnnnnnnnnnnnnnnnnnnnnnnnnnnnnnnnnnnnnnnnnnnnnnnnnnnnnnnnnnnnnnnnnnnnnnnnnnnnnnnnnnnnnnnnnnnnnnnnnnnnnnnnnnnnnnnnnnnnnnnnnnnnnnnnnnnnnnnnnnnnnnnnnnnnnnnnnnnnnnnnnnnnnnnnnnnnnnnnnnnnnnnnnnnnnnnnnnnnnnnnnnnnnnnnnnnnnnnnnnnnnnnnnnnnnnnnnnnnnnnnnnnnnnnnnnnnnnnnnnnnnnnnnnnnnnnnnnnnnnnnnnnnnnnnnnnnnnnnnnnnnnnnnnnnnnnnnnnnnnnnnnnnnnnnnnnnnnnnnnnnnnnnnnnnnnnnnnnnnnnnnnnnnnnnnnnnnnnnnnnnnnnnnnnnnnnnnnnnnnnnnnnnnnnnnnnnnnnnnnnnnnnnnnnnnnnnnnnnnnnnnnnnnnnnnnnnnnnnnnnnnnnnnnnnnnnnnnnnnnnnnnnnnnnnnnnnnnnnnnnnnnnnnnnnnnnnnnnnnnnnnnnnnnnnnnnnnnnnnnnnnnnnnnnnnnnnnnnnnnnnnnnnnnnnnnnnnnnnnnnnnnnnnnnnnnnnnnnnnnnnnnnnnnnnnnnnnnnnnnnnnnnnnnnnnnnnnnnnnnnnnnnnnnnnnnnnnnnnnnnnnnnnnnnnnnnnnnnnnnnnnnnnnnnnnnnnnnnnnnnnnnnnnnnnnnnnnnnnnnnnnnnnnnnnnnnnnnnnnnnnnnnnnnnnnnnnnnnnnnnnnnnnnnnnnnnnnnnnnnnnnnnnnnnnnnnnnnnnnnnnnnnnnnnnnnnnnnnnnnnnnnnnnnnnnnnnnnnnnnnnnnnnnnnnnnnnnnnnnnnnnnnnnnnnnnnnnnnnnnnnnnnnnnnnnnnnnnnnnnnnnnnnnnnnnnnnnnnnnnnnnnnnnnnnnnnnnnnnnnnnnnnnnnnnnnnnnnnnnnnnnnnnnnnnnnnnnnnnnnnnnnnnnnnnnnnnnnnnnnnnnnnnnnnnnnnnnnnnnnnnnnnnnnnnnnnnnnnnnnnnnnnnnnnnnnnnnnnnnnnnnnnnnnnnnnnnnnnnnnnnnnnnnnnnnnnnnnnnnnnnnnnnnnnnnnnnnnnnnnnnnnnnnnnnnnnnnnnnnnnnnnnnnnnnnnnnnnnnnnnnnnnnnnnnnnnnnnnnnnnnnnnnnnnnnnnnnnnnnnnnnnnnnnnnnnnnnnnnnnnnnnnnnnnnnnnnnnnnnnnnnnnnnnnnnnnnnnnnnnnnnnnnnnnnnnnnnnnnnnnnnnnnnnnnnnnnnnnnnnnnnnnnnnnnnnnnnnnnnnnnnnnnnnnnnnnnnnnnnnnnnnnnnnnnnnnnnnnnnnnnnnnnnnnnnnnnnnnnnnnnnnnnnnnnnnnnnnnnnnnnnnnnnnnnnnnnnnnnnnnnnnnnnnnnnnnnnnnnnnnnnnnnnnnnnnnnnnnnnnnnnnnnnnnnnnnnnnnnnnnnnnnnnnnnnnnnnnnnnnnnnnnnnnnnnnnnnnnnnnnnnnnnnnnnnnnnnnnnnnnnnnnnnnnnnnnnnnnnnnnnnnnnnnnnnnnnnnnnnnnnnnnnnnnnnnnnnnnnnnnnnnnnnnnnnnnnnnnnnnnnnnnnnnnnnnnnnnnnnnnnnnnnnnnnnnnnnnnnnnnnnnnnnnnnnnnnnnnnnnnnnnnnnnnnnnnnnnnnnnnnnnnnnnnnnnnnnnnnnnnnnnnnnnnnnnnnnnnnnnnnnnnnnnnnnnnnnnnnnnnnnnnnnnnnnnnnnnnnnnnnnnnnnnnnnnnnnnnnnnnnnnnnnnnnnnnnnnnnnnnnnnnnnnnnnnnnnnnnnnnnnnnnnnnnnnnnnnnnnnnnnnnnnnnnnnnnnnnnnnnnnnnnnnnnnnnnnnnnnnnnnnnnnnnnnnnnnnnnnnnnnnnnnnnnnnnnnnnnnnnnnnnnnnnnnnnnnnnnnnnnnnnnnnnnnnnnnnnnnnnnnnnnnnnnnnnnnnnnnnnnnnnnnnnnnnnnnnnnnnnnnnnnnnnnnnnnnnnnnnnnnnnnnnnnnnnnnnnnnnnnnnnnnnnnnnnnnnnnnnnnnnnnnnnnnnnnnnnnnnnnnnnnnnnnnnnnnnnnnnnnnnnnnnnnnnnnnnnnnnnnnnnnnnnnnnnnnnnnnnnnnnnnnnnnnnnnnnnnnnnnnnnnnnnnnnnnnnnnnnnnnnnnnnnnnnnnnnnnnnnnnnnnnnnnnnnnnnnnnnnnnnnnnnnnnnnnnnnnnnnnnnnnnnnnnnnnnnnnnnnnnnnnnnnnnnnnnnnnnnnnnnnnnnnnnnnnnnnnnnnnnnnnnnnnnnnnnnnnnnnnnnnnnnnnnnnnnnnnnnnnnnnnnnnnnnnnnnnnnnnnnnnnnnnnnnnnnnnnnnnnnnnnnnnnnnnnnnnnnnnnnnnnnnnnnnnnnnnnnnnnnnnnnnnnnnnnnnnnnnnnnnnnnnnnnnnnnnnnnnnnnnnnnnnnnnnnnnnnnnnnnnnnnnnnnnnnnnnnnnnnnnnnnnnnnnnnnnnnnnnnnnnnnnnnnnnnnnnnnnnnnnnnnnnnnnnnnnnnnnnnnnnnnnnnnnnnnnnnnnnnnnnnnnnnnnnnnnnnnnnnnnnnnnnnnnnnnnnnnnnnnnnnnnnnnnnnnnnnnnnnnnnnnnnnnnnnnnnnnnnnnnnnnnnnnnnnnnnnnnnnnnnnnnnnnnnnnnnnnnnnnnnnnnnnnnnnnnnnnnnnnnnnnnnnnnnnnnnnnnnnnnnnnnnnnnnnnnnnnnnnnnnnnnnnnnnnnnnnnnnnnnnnnnnnnnnnnnnnnnnnnnnnnnnnnnnnnnnnnnnnnnnnnnnnnnnnnnnnnnnnnnnnnnnnnnnnnnnnnnnnnnnnnnnnnnnnnnnnnnnnnnnnnnnnnnnnnnnnnnnnnnnnnnnnnnnnnnnnnnnnnnnnnnnnnnnnnnnnnnnnnnnnnnnnnnnnnnnnnnnnnnnnnnnnnnnnnnnnnnnnnnnnnnnnnnnnnnnnnnnnnnnnnnnnnnnnnnnnnnnnnnnnnnnnnnnnnnnnnnnnnnnnnnnnnnnnnnnnnnnnnnnnnnnnnnnnnnnnnnnnnnnnnnnnnnnnnnnnnnnnnnnnnnnnnnnnnnnnnnnnnnnnnnnnnnnnnnnnnnnnnnnnnnnnnnnnnnnnnnnnnnnnnnnnnnnnnnnnnnnnnnnnnnnnnnnnnnnnnnnnnnnnnnnnnnnnnnnnnnnnnnnnnnnnnnnnnnnnnnnnnnnnnnnnnnnnnnnnnnnnnnnnnnnnnnnnnnnnnnnnnnnnnnnnnnnnnnnnnnnnnnnnnnnnnnnnnnnnnnnnnnnnnnnnnnnnnnnnnnnnnnnaatgttcaatctcttttattctacttcatttatttcttgaagtcaataactttttgaacgattactttatttattctatattgtttttatagttatttcaatggtaagttttacacttttgaaattcttctttaaaaacaactgcgtcgtttttgacgactttatcatattatcaactttggaatttaaagtcaataacttttttaaaaactttttgtgttcacaacccgcttctttttcaacgcgtttattgcttaacacaagaacttattttaccagcattccaaaacaaatcaacataaaaacgtacaaaataaaagtaattttgtacgtttagcatatattatacctatttatttgtagcagctataactttttgtgcaatcgagctataaattttacctagacgatcatctgattgatatattgacggtgcaaaatcttttggattccaagatggttgctctaaaggtaattccccaagtaattgagtattaagttcatcagctaacttagtaccgccacctttgccaaagacatattctttattacccgtctctttactttcaaaataactcatgttttcaattacgccaagaatagaatgatccgtatgttttgccatcgcacctgcgcgagctgcaacaaatgctgctgtaggatgaggtgtcgttacaataatttccttacttgaaggtaacatcgtatgaacatctaaagctacatctcctgttccaggtggaagatcgagtattaaatattcaatgtctccccatttaacttctgtaaagaaattcgtcaacattttacctaacattggccctctccatataactggcgcattttcttccacaaaaaaggccattgatataactttaacgccatgacgttcaactggaattacttccttccctttaattccaggcttttcatcaatacccatcatatctggtacactaaatccatatatatcggcatctactaatccgacttttttcccttcacgagctaaggcaacggctaaatttactgcaacagtagatttaccgacaccacctttaccggaggctattgcaataaattcgactggattattttgagataataggccttctatcgttttaggtttattttcttcttttggtttaaattgatttactttttcttccggcaatgtttcaaatcgtataccgaccgttttcgcaccgttttcttttaatgcattaacaacagccatctgtaaatctaattgcggtgcaccacctaattgtgccattgctaatttaacactcacatgttctttttcttccttaatagaaacttcaacaataccttctgtttcttttaaaggcacatctataataggatctttaatttctcctaccaattctttcacttgatctaccgttaacaaagcaaatcccccttaatcattttaagacatctacatcatagcaaataacaatttttgcttagtctatcactaaaagtataaaactttttattaaataaaaaaagcagttagcctattattttaaatagaccaactactataattattttaaaatttccttctattactttctatttctttaggttctcttataaaaagtgctatcacataagctgccataacaagcacagctacaaaagcaaatgagatatccacccctatagcaatggattgctgtttaatttcagttgcagttaaatgcgatggcgatgtagataaaaatatttttgcaccaaaactcattaatgtaaccattaaagctgtgcctagtgaaccagccattacacgaccaaagttcataatagccgtgccatgtgagatttcttcatttctcaaagaattaattcctgtagtatttatcggcatcatgagtaaagaaactgaaaacattctaattgcatatacgactattaaatacgtataagatgtgtctgtatgcaagaaacacaacataattgtagtaattgttaaaattgtaaaaccagtataaatcaatggtctaggaccatacttatcataaaatttacctgtaaaaactgacataataccatttattattgcaccaggcatgataacaagtcctgataacaaggcagataaagataaactgttttgaacatatagcggtataagcagcgcaggtccaaccattgacatcattataatcattgaactaatcgtacataatgcaaatgttctatttttaaaaacccttaaatttaaaagtgcattagtaatattaaattgtctacgtataaataaatagataataaccatacttaatatcaacgcacctattactattggacttgtaaatcctaaatctcctgcactactaaatgcgtatagcattaacccgaacccaatagttgaatacattactgaacgcttatctaatttcgtatatttcacttcattgtaactcgagattgaaaccaaaccgaaaacaaaggcaagtatagcaattcctacaattataataaatggaactcgccaactcgcttgatcaataattaatcctgtaactgtaggtcctattgctggtgcaaattgaattactaaacctgctagtcccattgcaaaacctcgatgttctttactgaacaatgtaaataacgtaaattgcattaagggcataagtacgcctgcacccatcgcttgaattacacgagctaacattaaaactccaaaattcggagctaaggctgcaacaatagaacctaataaaaatgtccccatcgccgctaagtataaaggtctagttttaattctatccattagatatgccgtcagaggtatcatgacgccattaacaagcataaacccagtaactagccattgcgatgtactttcattgatatttaattctctcattatactaggtaacgctgtatttaataatgtttgatttaaaatagctacaaacgcactaatcaacataacagcaactatgaagtttcgtctccgggttgttaattcaactttagccatcataattcctcctttttaaaacagatatacacttgtccctttaatacgtatagccatgaacataatgggagtagtactcaaataataaagaagcactacataataaatcattattggttcttacacattaggcacagctaatgtgtacttaaaaactaacaatataacattgtagggcctaataatttattttatgtctcagactcatacaatggttatttaacttatttaccacaaattgagcactaagactcactattatcgattcttctattgaacaaaaagaagttggaacacatatgtgccctcaacttcagatatctattttctattatttaaatttttactttcagggtaaaattgaagcttacaaacatataagaaccctataataaccatgatgacccaaaaatcgatattgatatacacatagttcagatgaataataaaataaaataacgttgttgcaactgtgtaagaaatcaaatgaaaagtcgcgcctctaaaatatgcattttcaggcaacatttttctaaaataatccattaaatgctcgactgcaaatatgatgaagtacccaaagattatataactgccataatataataggttatcgtacatacttctattatatgtaaagtcacccaacctaaaataaataagtattctacttaatccatataaaccaaaccctagaaatgttaaaaaaatcgcaccagaaagtacaaaaataaagagaacaatcattgtagttaacaagttataaaacttatgtttaagataattcacaatcattggcctccttattaataaaatattgaacgatttatctagtatctaggaaatttattatttcttactttaattacactacatcaattttaatcataattctattcttttgattgagatgactgttctttaaaaaatacgacccataaaacaataagcccaatgctaattacagcaacagcacttaacacattgtgtaagtttggaccaaagattcctgattgtatcgcataaagatatcccattattgttgaacctattgatgccccaagatttttagttaatccataaaatgacatcattttcttcatttgtaatgggctagtttcctcttggacaatcacactatctttcgtataaatatatccaaaacttaatcctgccaaaattaacacaaatgctataagtaccggcaatttaataccaaatgaaatgataatactacttactagtagcaatgtaaatgatagtaagtaaataactttccttgatagttttgcttcaattcgatgtaaattaaaattcaatgtaatccaagctacagataaaggaaaaataaccaatccactttgcaatggagataatcctagttgttcttgaaggtagactggaatatataaattgaatcccattaaacaaatagctgttagaaggtcagttataaaaactaaagtaatcgaacgattaaattcaaccacaggtaaaaatggtgaagaaacatgtttttctactttaaataaacacattgccacaacgatagctaagataaaactcaagaaatttaaaagtaacagctgttggtttaataaagcaaacataatcaatccaataaatacataaaatagcgtgagccctttagtatcaaattttgatttagcaactgtttcttcctctggaaaatgaaatgtccatataactaatataatggcaatgatcgcaatcggtatatttatgtagaataaccaatgccatgttgcaaattctaatataccaccacctagaagtggcccaatgatactcgaaataccccaaacactgccaactatgcccataattttatatcgtaacggaatttcaaatgctaactttggaacaatttgcgataatgacatcaatacacctgatccaaaaccttgtatcacgcgtgatataattagcatagtaaaattagtacttaaaccacacataaaactacctatactaaataaaagtaatcctgcaattgccacataaataattttaaatctcgaaagtaattcgcccactataggattggcaattactaatgcgataaaatacgctgtgaaaattaatgaaattaaatttcctgcatttaaatcttgtttaattgtaggtaatgcaagcgaaataatagatgattcaatcgctgacataaacataattaatattaaagctataacagttatgattgactttaatcgcatgaaatacctccttctatatatttatttataagattttatttacaaataattggttttcatatgtataaacacttttgactttcaaatcttaacgataattctattacaatacaatcccctattagaatgatttatgtaataaaaaaagcggagtttcccccagcttttctaaacgactacataaaatataagattgcaattaaatgcaatagtgatgctattacaataaaaatatgccaaatcatatgaaaatatggtctattcttttgtgcataaaaccatgcaccaattgtataagacacaccacctaagaaaatgaataatatgaatatccatgatgtgcgaataaaaataattggtaacaagataatacctacccagcccatcactaaatagacaattaagcttaacttttggttaactttgacagctatggatttatataaaatcccccaaagtgtcgttccccataataaaataaatactgtccaacctatccaaccacctacaactgttaacaaaataggcgtatatgtaccagaaattgctacgtaaatcatactgtgatcgataatccttaaaatatatttatgaggtgtttcattttgcatagaatgataaatagtagatgaaataaacatcataaagatagaaataacataaatagacatactcacagacgcaagcgtaccatgtgcaatataactgtgcacagccgcatagggtaacactaataatgttaacaaagctgcaacaccatgagatgccgcattaccaatttcttctccaaatgataaagggatgatatccttaaatgtttctacgattgtgtcattactttttttagttgatttggacatcatagtcaccgcctatcattaaattaaacccattctacgtaaatcttctgttgcagttgcaacactatctttaccttctttatttttaagaggtgaaaattcttcttctctaggaacttgtaacgtgacaaaactagttccataagtaaatatgtcaaaatagaacaattcgaattttaaagttggttgttcaataacaccaaagttctcatctaattgcttcaaattcttaatagctaaatgataaggtaactcacgatttacagcgtttaaaataaaaccaagtttaaatgcatgaataccgatattagcattgttaaattgatttgcaacttctggatctaattctgaatactccagtactgtatctttacaatcgacattaactaaacgtccaacactttctcctggttttggttgaatcgttttagaagtaatatcgtaatcatgttctaccgtaaatcctgcaaatagtggatccaacactcttactaaaacattgtcgatattattcaagaaaatatacttaacgccattattagacatttcttctaagtatcctgccttgtctaaagatttaaacacgccaccattaccattcggcgtttccataatacgaccctgttgatttaaaattaacttcccttcttcactaagcgccacaatattatcttgtttaaagaaatggattgcttcttgatcatatccaaaataactatgtgcttcgaaataagctaaagtttcttcatgattgatatcacttgtcataatataccattgaatcgtatgtccagattgatgattcaatgtttttaattggttagcttgaagttcaaataaacttacaccttcaatttcaaacgaacctttagggcccttgtaaccaagtcttgttccttgaccacctgccatcaaaagtactgcaaattgtccttctttaatagcttgaagtccttgttcctctaaacgcttaatctcatcatcactcatttgtgatttaatatcatatttcacttcagaaactgcagatacatcatctattgttttcttattgatgtataaatcgttatataatttggcaataaaatctaaatctaatgacgctaccttctcttcaagtgcttctttttcattgttactcattattttttcatattcacacaaatgatcttgtttatatttagctaattgatttttatctagcattttatgcctcctgctgagtttgtaacctttaataatttattttctataaaaacttagtattccagttgcttattatatcattgatgaaaggctgaaataaaacataaactgttccgaccattaacgctgtagctaaagataagtctacaagtccacctgttttaaattgaatcggtgtcttcacattaaacggtaacggataaaataatttcacgccttttggtgttatcatatctagtataacatgtgacactaatccaattataattgctgccatataataattaggcgtctgaataatttgcaataaaaatgctatgattgcgataaataatattgaatgcgtaaaggttcgatgtccaaagatcaatctcacaaaaaaactaattaccttaaaccttctgccaatcttactttgagtgtgacatatatcgggtaataagctagctagagttgctagaatgataaccgtaaccgacgaaaaaatatccgtttgaaaatattgtgttgttagcgctccaacgagcatgccgcatgaagcatgtgttttacctgtcatatttgttctcctttaatactcacattttaccacatccctaacaaaaacacgaacatattttcgggttaaaattcattagtatgacacaatttaaaaaagtatcacataactcttgaaaacgattacaaaatcgtttatgatgtatttacaaaatatttaaaggatgtgtttgaataatggcaatgacagtaaaaaaggataataatgaagtgcgtattcaatggagagttgctgatatcaaaattcctacaagtgaaattaaaaatattacacaagaccaagatattcatgcagttcctaaattagacagcaaagatgtatctagaatcggctcaacgtttggtaaaacgaatcgcgttattatcgatactgaagaccacgaatacattatttatactcaaaatgatcaaaaagtttacaatgaattaactaaataaattgtaataaaaaaatcattcatggtgagggcttcatgaatgatttttttaattgattcaacacccagcataaacaaatacaaaaggacaactgttcccataattttaacagttgtcctttttcacatatatttataacaaaagatgtgccatcaaagaaataattggtagtgtaatgattgttctaatcaagaaaatcataaacaatttgccgatgcttacaggaatcttcgaaccaagtatgacgccacctacttcagacaagtatattaactgcgatatactaagtgccccaataacaaaacgagttatatcattttgtacaccttcaattaatatagaaggtaaaaacatatcggcaaaaccgataataatcgtttgagaagcctgtgccgcttcaggtatttgcattaactctaaaaatggaacaaaaggtttacccaatatgacaaaaaagggcgtgtagttcgcaataatggtagcaatagtaccaatactcattactacaggcaaaataacaaaccacatatcaatgactgtttttaatcctgacttaaaaaagtcaataacgcccggtgctttaatacctacttctgttgcagtatcaaagccatgtctcaatgccgtctttccttctggcaatgcctcagtacgcgcactttcaggtacctccttagcatactcatcaggaattttatttaaaggccaaattcttggcataatgactgctgcaacgaggcaggatactatcactgataaatagaaagcaaaaaattgattttgcatgtgcactgtttcagcaactacaattgcaaaggtgatagaaactacactaaatgtcgttgaaataactgttgcctcacgacgagaataatatccttcaccatattgtctacttgtaattaagacaccaacagttccgtctccaataaatgatgctaaattatctaccgtcgaacgtcctggcaatgtaaataaaggtctcataaccggtctaaaaataggacccaacatctctaacaaaccgtattccattaatagcggtaaaaatagagctgcaaataagaatactgccactaatgttggcaataaacttgagaacaataatccacccgtttcatctgagtaaataacctttgaaccaattcgtaaaaatgtcatccatgcaaaaacaactgctaatattcgtaaaattaaccaaccaattctaacgttaaaagcattgttcattagcccgtcaggtttcaatttatcttttaaaatagttgaacaaatcagagttatgatacccgataaagtaattatcgtcacaattaaaaatggcattacgccacctaatacatctttaagcacgcctgctaaaaatgccacgggcaacgttgtttgcttctgtccatcttgttcgactggaattggtactaaaaataataagataccaattaaagacatcgtaataaacttaagtctcccaataactatctctttccttgaaaagctatccataaaatcaatccatttctctatgtattcgttttaagtatatacagaattctattcagttaacaaacatattccttatcattctatctttcaaaatgtttatgtatgcaaaataatgaataattacagttattaaatatacgctatttcttgtaatttttcaagatgaattcaaaaaaggttaagtacaattactgatttcgtacttaaccttttttaaactctaatcatatgttagttatttcattcttcgtaataatattaagaagtatggtgcaccgataattgcaatgataaccccaacaggaatatccagtggcggatgaatgccacgggctaaaccatctccaaatgttaacaatatagcaccaattaaccccgacatgataataacgtgtaatgttttatttcctattaattgtctcgcaatatgaggtgcaattaatcctaaaaagctaataccaccgacaactgaaattgcggatcctgctaatattactgctaaaattaacaatagcattttaatagttttaacttttaaaccgagtgcggttgcaacagcatcacctagattcaatacatctaattgataactcaataaaatgatgattggtatcgttattaaaaaccaaggtaatatagtataaatattcgacatatcatgtccatatagactacctgtcaaccaaacaagcgctttgtttgcttccagtggatttctgattaataagaactgcacaatcgccgtacatattgcgcctattgctaaaccaattaaggcaagctttgaacctttaacatcatattttgaaattaaaaatgataaaaataaacttactgcaaaggcacctaagaatgaacctataggtaatacaaacaatggtgctgttggaaaggtcataataataatcacagcagctaaactggcacctttagaaatacctataacatcaggtgaggctaacgggtttcttattacagcttgtataattgcacctgaaatagccaagctactaccgataataataccaagtaatgttctaggtatacgatactcatttaaaataaaatcatcttgtgtaaagattcccttaatagcatcaatcggatgaatcatgacagaccctacacataaacttatgaatatactcacaattaaaaggattgtgattaaactataacgacgtataattttcgttgtcatcatattcttttcacccctttaatcgttataaataagaagtaaagtgcacctacgaatgatgtaacaatccctactggtgattcataaggatatgtaattaaacgacttaatacatctgatagtagtaacaaatctgcacctataataaatgttaatggaatcatgactaaataattcttactcacatagcgtttgactatatgcggtacgattaagccaacaaatccaattggtcctgccactgacaccgacatacctgtaagaataatgactaatagtccaatgataattctaactttatttatattttgacccaatcccttagcaatgtcatcgcctagttccattatcgttagttgacgtccaataaaaatcgttacaattaaagcaccaataatccatggtagaatggttaaaatttcatcccacttcatactggataatgaaccgacaagccaaaacatcacttgttcgtttgaattctcattcaaaataataataccttcggtcatactactaaaaaacaaatggatggccataccagccaatgctaatttaatgggtgtcatacctttcgtagcacctgaaagtgtataaacagttaaaccacctataaatgcacctatcacacctaaatataatgcataatattctaatgctggaatgataatcgtcacaaatacaatgaaaaacgatgcaccagaactgacaccaaaaattttaggtgatgctagcggattgcgtgtcattgcttgcattaacaaaccagataccgctaatgcaccgccaataaataaccctgcaatcatccttggcatacgtacattatgcaataaaaacgttgctttcgtatctgtatgaccagtaacatagtgaatgatatcgctaaaattaattttcgaagaaccaatcgccatatttaaatatatacaaataaaaagaaagcacaaactcactatatacgtgagtgttgtgcgtctttttcttttatgatctatggcagattggctacttatttcttttatagccatttacttccaccttacttttgttctttttttgataattcaacaagttctttagccatttcttcagaagaaattaagccacgagatcttgcccaaacatcacggtcaacaatatccacgcgattatttttaactgcattcaactttttccatgttgcatcttcttgtaacttcttgaattcagcagaatcttttttagcatgatctgtcataatgatcatacgctctggatttaaatcagctaaatgttcagtgtctaattgtaagtaaggtcctttcaaatatttacttaaaccttttgttacatcgtcacttaatgcatttttaaatcctagttcgtttaaaaattgtccaacatatgaatagtttggatgtgctaataaaccagctttagcaactactgctggaagcactttttgatttctatcaaatttaatttcatctttatacttattgattaatttatcatgctcagcaagacgtttttcgccttctttttctttatttaaagctttagcaattgttttgaacgaattaatattttgtttgtagtctccatcaaaactctttaatgataatgttggtgcaattttgtttaattctttattaatacctttatgtctactgctatcagcgataattaaatccggttttaatttactaatttcttctaagtttggctgtttacgtgtacctacagaagtataatccccaattttttctctaactggtttaatgatacgttttttcttaccatcatcagcaataccaactggtttaacgtctaatgctgctaatgcatctgcaaatgagtactctaatacaacgatacgttttgcatctttaggtacttttactgtaccattttcatcttttaccgaaatagtatctttagttgatgattcttttttacttgaattatccgtattaccacaagctgcaactaaaagtaaggcaactattaatcccaatatactaaaagtttttagacctctcatcgttccactccttaatatgtataacttcatttattattttattgataacaattatcattgtcaagtagcgttcaatcttttttgtatttctaaaatgtatgactatatatttcctctaataattatgactacaattagcacatttccttagacaaaatactgataatgtatcattgctatatcatctttgcattaatacaattgacaccatttagcatgaccgttatccctgtaattcagctgatattatctgttgcaattttatgtgacgaactgttgcacttaatttgataaatcaacaaatacaaaaaatctaagttgaacaattatgatacaaccgtgcaaacgatatgtagtataacttgtcaacttagacttattgataaatatattaatagtggtttaccatagcaggagatttcacatcaaaattttgaagtagcgtatcaatctttgaatcatcaatatataccttatgtaaatttttcatatacatcgaatgagaaagtgcttcataatttaatgaaaaagatatatgatctccaacttgatagtgtccttgaccatttaaatcaagcattaaatgatcactcgaagcgcctaaaatattgatatgctgatccataggtgaaatattatcgacttttgtatctaaataaccaatatctacaatagcttgtaagaatgattcatgcgtttgtgtattaactcgaggtttaatttctaaaatctcagcctccaatgtaatcgcatcttgatataacatagcgatcgcttgatttgtcgttgtatcaacacctctaaacaacgtttcacctattcgcaattcatttattttacccaaatcattatataaaagttgtggtaacatgctcgaattaccacctgaaataattttcaatcgatatcctatttctctttcaacagctgagacgaatcgattaatcataaagatatcatcatcacttggcgcatcagatttaaaacacataaaattgaatgctaaacctacaaaatggatatttttcaagtgaataatctctttaatataatctaaaacatcataagtcagaacaccttcacggccatctttccaatctaccattaataaaatcttatgtttttttcctaaaacttctgctacttcatttatttgatgtatggtagataattctgtttggatactcatatcaactttttctatcatatctgaaatctcttttttggcaggcgtacgcaataacgtatatgttaaatcctgatctgcaatactaattatgttatccaatctggattctgcaacatgattgatacctaacgcttttaagctttctacaattgtacggtcaccagctatgcacttaattactggtgtgaattgcatatttttactttgaaaaactgtttgaagtactttggcgttatatttaatcttcgatatatttatgttaacgtgtgccatgtagtactacacctctttttttatcggattatctaactcaatatttaaatattgctttactttattttccattctcatatttaacaacgctttgacagtaattgttggtccaaacaaaatatcttttaactcatttgcatgtggtagtgttgggttaatggcatgcgctactacttgctgtactatgttaaataattcggtttcttcaacacaatcatactgattaaaatgatggattaattctgccatttgattttgaataacagcatgttggaattttgcaatcactgcatctatagaatcagctattaaactatcatttgtaattttaatatctgatacacgatgttgtaatgtttctaaatcaattctagaaccacctaaatctctcactaaaaattgaatgtcaaaatgtggccccaagttcactactgtattttgcatgtgtgcttctaaagcaattccataattttgaataaaagcaattaaaggcgggattaatgcttgagcgtatcgttcaataaatgtcgtaatactttctttagtaattccttgatttaaccactctaagtaactatccacgataactttttgatctattggatttttattaactagacttgcactaactactgttgcaccttttccatcaatttcaggcttttgtcttataatacaagcaagctgacgtgccctatctttatcaacatttgcatattcaccgaacggttccatagcaactttaaatcctggatattgattcaacatgttttgtaaagcataacttaactttggtccatctacagtagtcacagttgagactgttctaacggcacttgttgcttgtgcatcgacgggcaacttaacatggtatggtttatcaattaaagacatcgtcctaaatgataaagttgcttttgaaagtattgtaaacggcgttggaattaatatttttttagcaatccatgcttcaaaatatttccctatcgtatgatcatattgccaaggatgtactaaaatcgctctatagtcttcacttttcaaacccaaactctttaaaaacacacgaatctgattgtagtattcgggaattatttcatcaataataaattgatcattaccatccatagctgtgcacacaacatggtctttttcaatcatcataatttgcaaagggatttctttttcaaactcaggtgcatatgctcgtacttcttccatagttaagggcaatttcgttttggttaaagggtgtgttggatgcccctctggtaccaaactctcagaataagttaaatcatctgtcttatcactatcttttacatgttgtaaccatgaaaaaaagttaatatcttgtggtaaccttgaaaatttaaaactttgacttattaacgtttgtctgtgagacatttgcttatatgtttcaactaaactatctcgactgtgtattaactcttcgcgtagtcgctctgaaatagggatatcaaagtcatgattcaacacatctaataaaccttctaaagttataattaatgacgtttcacctttatttaaataagtaatatcacctgtaaactcatagcgttctaatgcactttttctaacaacttcaatagtcaacacatgcatatgatactgaatttcaattaaagatcctttttgcgaaataaatgtttgctcggggtaaatacgttctttaataatggcgttaattacacgatattgaatatttctatctgcctttgcccattcaagatataccatgattactttcctccaactttaacttcaactttctatttataaaatagaataccattgtaatgcatatagtacttattcccattattgaaaaagttctaacaatgccaaacacatctgcacatatactcattaatagacttcccaatggaatcatacctctatccatcataataatactcagtactttaccacgttcataatctttaacattattttgaaaataaacgcgatttgtcgtacgtgcccattgactaaataacccaatcaatgtaatacaaatgaacatgatgacaatattgtgaaataccacacctaacaaagcaatgccaaataaaaatgaacttaaataatacatatttaccataccaatatatttaagtactttaggtaaaactagcgttgcaataataccaccaatggcacacatcgtcatagcgataccaaatatttcagatttccccggaaatactttgtttgtcaaaactggtaaaagtgtcgtatatgaaaaacctgtcgccataatcaataatgatgttataaatatttgtcgaccttccatatgtaatttgaagtaatctataataacttttaacggcatgtatcttgatgcatcttcaggtattttagttactttaaaatgtaatggtaagcataataaaactgcgataaaataacaaattgcctgtgcaagaaatgttgttggcgcatgatagactgctaatatgacaccagcaatggcaggccctattgaacgacaaatattaatgatgaatgaatgaaatgatacagcttgtgtagtagatattttatctgataaatctggtaagattgcttgtcttaaaggtgtttcaaccgcacttaaaatccctcttaatgtcgcatatataataatgacgctaattggaattgcagtgaaactatacgtgagcacacataaaattgcagttactaaaaatgatgatgaaattgtaattctcagcaatcgccctttatcatatttatcggcaattgcccctgcccacacacttagtaataatattggtacaagtctgcaaaaattgacaatccccagataaactgcgttatgataagtggtaagtacaaaccaatttagccctatttgtccaatccaattacctagaaatagtagaaaagaactgctaaaaaaatattttgtcataaaacttacacccgcattctgttgataataagaatcattatcattaatatggattatacaaatctatcttgcttttgtaaaatatttcatagaggtgaattatgaacttgaacttaatttttaaagaacagacattaaaatttaacaaagaagaacaagaaacatatttatttttacaacaacataatagcgattgggctaatatttttaaagagatgattttacaaggaagagataaagtcactcagagattggtcacatcaatgcatcgcgaaaacttagttaaagcgcgcactcaaagtaagaaaatattgagtcgtgatttgattatgttagatatctcaacgactcatatactagaaatccagttcccacaagctaagcaaacattatatgctcctatcactggagaacacgcctttgatcgaattgatgttgaaggccctttctacattaaagatgacattacaaatacgattacacgagtacaccatccaaatgaaattcttgagtgtattttaattgaagcaccagatttaaaaaatgctgctagtgatcaatttcagcaagatttaataaacagtgcaactaatatgacatttgcaattagctatcaagcactgtcaatgcaacatgattctgcacctttatttaatattatcgaaaatagcgaagatagttacttgcgttcagagcaagccgttattgaaggtcatccgctacatcctggggctaaattacgtaaaggtttaaatgcattacaaacattcctatattcttcagaattcaatcaacctattaagttgaaaatagtactgattcacagtaaattaagccgtactatgtcactgtctaaagattatgatacaactgttcatcaactatttccggacttaattaaacaattagaaaatgaatttacgccaaagtttaactttaatgattatcacattatgattgttcatccatggcaattagatgacgtattacattctgattatcaagcagaagtagataaagaattaatcattgaagcaaaacatacgttggattattatgctggtttatctttcagaacattagttcctaaatacccagctatgtcgccacacatcaaattgtcgacaaacgttcatattacaggtgagattcgtacattatcagaacaaacgacgcacaatggtccactaatgacacgtattttaaatgatattttggagaaagatgtcatatttaagtcctatgcatcaacaattattgatgaagttgctggtattcatttttataatgagcaagacgaagcagactatcaaactgaacgaagtgaacaattaggtacattatttagaaaaaatatataccaaatgattccacaagaagtcacaccattgattccttcaagcttagttgcaacctacccatttaacaatgaatcacctatcgtgacattgattaaacgttatcaatcagctgcatcattgtctgattttgaatcatcggcgaaatcgtgggttgaaacttatagtaaagcattgcttggtctcgtaatcccactagttactaaatatggcattgcattagaggctcacttgcaaaatgctattgcaacatttcggaaagatggtctattggacacgatgtatattagagactttgaaggtttaagaattgataaagcacaactaaatgaaatgggatacagtacatctcatttccatgaaaaatcaagaattcttactgattcaaaaacgtctgtgtttaacaaagccttttattctaccgttcaaaaccatttaggcgaattaattcttacaatctctaaagcatcaaatgattcaaacttagaaagacatatgtggtatatcgttcgtgatgtactagataacatttttgatcaacttgtactttcgacacacaaatctaatcaagtaaatgagaatcgcataaatgaaattaaagataccatgttcgcgccatttatagattataagtgtgttacaacaatgcgtcttgaagatgaggcacatcattatacttatattaaagttaataaccctttgtatcgagaaaataattaaggttatagaattttattaatcgtgagctcaaggattacattaacttattaaatacaatctatacaaatgagagaataatacattttccatattcaaattattaaaaatcacaaaaaacaggctgggacataaatccctaaaaaaacagcagtaagataattttcaattagaaaatatcttactgctgttctctatttatacaatacttcgtattgaatggcttcgctttcctagggtgccgtctcagcctcggtcttcgactggcactgctccctcaggagtctcgccattaatactacgtattaacatgtaattttacttttacatacttttaaaaaataagacactttgccaaacttgcacataaatgtttaattcaataatttgaattttctgtgttgggtcccttcgtataatttaataaataccactaaactaaattaatgaagtgccttatgtataaaaattataacttgatccaacttacactaccaatagaaacttctgttagaattcctcaaattgatatttcgcgatatgttaatgaaattgttgaaacgatacctgatagcgaattcgataaattcagacatcatcgtggcgcaacatcctatcatccaaaaatgatgttaaaaatcaccttatatgcatatactcaatctgtattttctggtcgtagaatagagaaattacttcatgacagtattcgaatgatgtggttagctcaaaatcaaacaccttcttataaaactattaatcgtattagagtgaatcctaatactgatgcgttaattgaatctttatttatccagtttcatagtcaatgtttaaagcaaaatcttattgatggtacaaaagtagaagctaatgccaataggtatacatttgtgtggaagaaaagtattcaaaatcacgaatcgaaattgaacgaaaattcaaaagcattatatcgtgacttagttgaagaaaaaataataccagagataaaagaagatggagatagcgatttaacaatagaagaaatagatttaattggtagtcatttagataaagaaatcgaaggtttaaatcattctattgagaacgaagatagtactcaaattagaaaacagacccgtaaaaaagaactaagattaagaagttcaaaaataaatttgatgattattccgaaagaaaaaataaatatgaagaacaaaaatcgattcttaaagatagaaatagcttttctaaaactgatcatgatgcaacttttatgagaatgaaggaagaccatatgaaaaatggccaacttaagccaggatacaatttacaaatagcgacaaattctcaatttgttttatcctatgacctatttcaaaacccaacagatactagaacattaatcccatttttaacaatgattcaaaataccttcggttatttaccagagtatattgtagctgatgcaggttatggtagtgagcaaaactatatggctattatagatgattttaataaaacgccacttattacgtatggcatgtttattaaagataaaactagaaagtttaaaagtgacattttcaacactcaaaattggaaatatgacgaacttaatgatgaatttatatgtcctaataacaaaagaataggttttaaaagatatgcataccgtaatgatagatatggttttaaacgagacttcaaactatatgaatgtgatgactgttcatcatgttctttgagacatcaatgcatgaaaccaaattcgaaatccaataagaaaatcatgaagaattataattgggaatactttaaagtccaaattaatcaaaagctttctgaaccagaaacgaaaaaaatctatagtcaaagaaaaattgatgtagagcctgtttttggatttatgaaggctattttgggtttaactcgaacgtcagttcgaggaataaataaagttaaacgagagctaggttttgtattaatggcacttaatataaggaaaatagcagctcaacgagctgtacattataaaatacatatcaaaaaagctgatttctatcaaataattaatagaaatcagcttttttacattgcctaagaatttaatgtcccaagccctttttatcgaataacttattgtaaaccttgtctttcttggttattgttttcgttatttttttcgtgtttttgtttccactctttttgagtcattacatcgtcaacttgcatgttaacttcaactacatctaaaccagtaatatatttaacttgttctttaactaattcagttactttacggaagatttttggtgctgattcaccatattctaagattacttttaagtctacagcagcttgtttttcaccaacttcaacagatacaccttgagtaacattgttgccacttgagaatgcattagtgaatgtatcagttaagccacctttcatatctaagatacctttaacttcacgtgcagcgataccagcaattttttcaacaacttcatcagagaatgttaatttgtttttgaattgaggctcctgattttgttcttgttgtttttgacgctcttctctttctttttcgttaacaccagtttgattgtcgtatgcttgttttgctttattgttatctacagtcataatagattctccttttacttgttaatttttatatttttttaattaaattctaaattgatgaattaactccatcgatttaaaaaattcataaaatcttgcttacggtctttcatatacccaatacctacaccaattaaacataaaacgatgataagtactgttttccaaaaacctaacgttaagaataatatcgcgattaatagaaacgctaggaaaccaacgattctccatttaaatacttttaaaaaattaatcacttgttgtgtagagtcttgtccgttttggttatgattgttagccatgatatacctcccttacaacactcgtggaccagaagttttctgatctctcacattaacttctaacttacgtactggcatttctgtgaaatattctacattctttttaatatccgaacgaattgcttcagttaaagattgaacttgaacattatttggtacgaaaaagtcagttttaatgtcgatataagatttattttttttgttatatagtttcgcaactacatttggttgtcttacttgatcatattttgcaaccgtatcgaatgccgtcttttcaacagctttacgagatacgtaaacatgaccatcatcgaagtctttgtataatccaggttttcgatgcgtaggtttgaagatactaaatactaatataagacctattaatatcaatagtgcagcaagtgaaataagtaatggttggaaccattcaaattgaaggaagtagtcttgatattcagttatacgtccatcttggatatacatgaataacaggaaccccacgattactactattaataagccaaggataaagtttttaagtcgtttcacccctaacgacacctccttagttaaagttaatttaaaaacatattaaatatgtacccatcagtttttttcttaaacataataaattaataactttaaatttatttttaatatataagatgaagtaccatttagtaatatattccctagtttttgtaaataaaacctcattattaattaattttcgtcaatatgttttgaagaacgatattctaaaatatctgggtcacgatgtttaattaaaaccttattactatttctcggtttctcctcactcaaagattttataagcgaccatatcatcgctataatgaccacggaaaatggtaacgcagcaatgattaataaattttgaattgcttgagtaccacctgtgtaaatcatgatgattgcaaataatgccataatgataccccaactcactttgacaaatgacttcggattaatatcaccacttgaactcaacatacctaaaacataagttgccgaatccgctgatgtaacaaagaaaatcataataacaagtaaagtaattaagcttaatacaaaacctagcggataatgttgtagcgtcgcaaaagttgctgtttctgtcgcagctttagcaatatcggcaatatgattatcttgtaagtaaattgctgacgcgccgaataccgcaaagaatataaagcaaactaacgccgggacaaaaagtacacctagaataaattctttaatcgtacgtccttttgacacacgtgcaataaatatacctacaaatggtgcccaagatatccaccatgcccagtaaaagattgtccaattttgtaaccattggaatttttgaccacctgtcggaatgcgtaaactcatactaaagaaatttgcaatataattacctagaccattcgtaaatgtatttaaaatgtatagcgttggcccaacaataaaaagaccaataagtactacaaaagcaagtaacatgttgatattactcaacgttttgatacctttatcgatacctgaccatgctgaccaagtaaataatatggttgcaatgacaatcaagattacttgcatcgtgaagttactcggtacattaaataaaaaatgtaaaccttcgtttatttgcaatgcaccgaaacctaatgttgcagcaacgcctgttactgtagctatgactgccaatacatcaatggcaccacctaaaggtccacgcattgccttttcacctaataaaggcgtcaatgtagcgctgactaagccaggatatcctttatgaaagctaaaatatgcaaacactagcgcgacaataccatagactgcccatgcatgaatcccccaatggaaaaatgaaaactgcattgcatcattaattgcagattgcgtgccagctttatgaataggcgttaatttgaaggcatgactgattggttctgccgttgtccagaacacaagtcctattcccataccagcactaaataacatagcaaaccaagacggcaatgagaattcaggatcttcgccttcttcacctaatgtaatgtttgcgtatctcgaaaataaaatatacacacagacaaataaaataactaaaacgagcaataaataataccaagaaaaatgtagcgcaataaatgtagtaatgttttgcgtgagtttttctaactgtttcggaaatattgctccaaaagcaacaaatatcgtacatatcactaaagatacccaaaacactagacttactgatttatttttcataaatacaaaccctttctgtgtaatggtaagttcatacccataactgcaacattttaatcatttgtaattttatatagacacaattaataatgcctcatcttttaaaaatgatatataaaacacactcaaattatttatcattgagcaacaaagtattttattgtatttaagtaatgcctttctagtgcattattgatttgatacctgcaaagttgccatatttccgtttagaatcaatagtcgctagacacaaaaaataagtcgcctatacagtattttctgcataaggcgactttacttactaatctatatattaattactaattttccaatcattgattgtttttccaacaattgatgtgcttgatataagttttcaggtgataaaccttcaaaaacttgtgtcgttgttggttggtaatgccctgattctatatttttcgtaatatcttctaaatactcatgttgtttaatcatatcaggcgttcgatgaattggacgcgcaaacataaattcatgtgtaaatgttatactttttaattttaatgcatttaaatcttgatcttcattaaaagctacgatagtcgtaatatgccctaatggttttatcagttcaatcatagtattgtaatacaagtctgtattataggtgcaaaatatataatctactaatggaatttctttaaattgacgcactaaatcctctttatgattcaatacgatatctgcgcccatcttttcacaccactctgttgtttcttgtcgtgatgctgttgtaatgacagttaaaccataccgtttagcaatttgagtggctatactgcctacaccaccggcaccattaatgattaagacagacttcccttcgttttcagcaggattcgtagaaattttaaatgtatcaaaaaacgtttcatatgccgtaataccagttagcggtagactaaccgcttcattagcacttatgttgtgtggtgcttttgcaactatagcttctgacaccaattgatatgtcgcatttgatccttgtctatttggcgatccagcataaaatacaacgtcacccggactaaataatgtaacgtctggtccgatagcttcaacagtaccaatagcatcaaacccaagtacacgaggtgcttgagtgacttccatttgtcgttgctttgtatctacaggatttacactaatgctatttactttgactaagatatcatcgttttctggcgttggctttctttgttcgtatactttaaataaatttccttcttccaatttaaagggcttctcaaatcctatcattttcatatcgtttcacctcatttatgaacttatttcttattatacaaaatagaagccatgtgtgcttatatcgcagcatcatgactcctttttcatttgaatatataaataattacagacgactttcgtattaaattttagacttatttctaccatgttgctgaacaaatttactttagataaaaaattattaaattttggtcaattaacaaagttagtttgttaaaacgtatactttattattccgttactttaataacttgtttaccaaagttatcgccagtaaataaatttttaaatgcatgtggcgcattttcaaaaccatcttcaatggttacttgtgactgaattttaccttcttgaacccatgttgcaagctgttcactagcttctttaaaagcattagcgaattcacttaccaagaagcctctcatcattacttgcttcttaataagcgtaccttgaatacgtggtccgatatcggcttcaggatgattatatgacgaaattgcgccacatactggtacacgtgcaaaacgatttaaatgcttaaatacttcatcgccaactgttccaccaacattttcaaaataaacatcaataccatctggtactgcttgtgctaacgcttctgcaaaatcctctttcttataatcaataccagcgtcaaagcccagtgtctctgttaaataatttacttttttgtcgccacccgcaatacctactacacggcaacctttaatcttagcaatttgacctacaactgaacctacagcaccagatgcagctgaaaccacaacagtatcaccggctttaggttgtccaatatcaagcagaccatgatatgctgtttgtcctggcattcctaaaacacttaaatataaatcaagtggtacatctgtcgttggaactttagtaatttgatccgcttggacatgattaatgattcgccaaggcaacatacctacaacgacatctccttttttataatctgcgagtgtcgaatcaattacttttgcaacgacatggctaacaatcggtttaccaatttcaaaaggctgtacatacgaatctgccttagtcatacgtcctctcatatatggatccactgaaatatacagcgtttgtacaagtacaccatcgctctcaagtttaggcgtgtcaatctcttcaattttgaatgtatcctcttgaggcatgccttctggtattttgttaaaaagaatttgtttattttgcatcattaatcacctttctttatttgaaacttttacttatttgttacttaagcgttaagtttgaattgtgtcttcgtgatgtctgtatgcaaatacattcttagttgttatattttgacttaagcactgattcattcatgtaacttcaaccacattatatttgctataatcataaatttaaaatgttacgacttagacattttatggaaactctcaaacaatagataatttttgaaaagctctaatattacaagcttttttgccccagaaaaactagcagttgctttattttttccataagaagtcgattaactcattagcaacattttcattctcatgaagctgactatgttgtgcaggctcaccttcatatttagattctcgataacttttcggactatttcccagtaaatattttaatgatttcgaagaactattagacactctgccgtctgaatgtgtaccatctttcaaatccccataaatatttagcacttcgatacctttacctttataaatatcttttagcacgcgtaattgctgataaggttgattcattcgacttggtttaccatctttatcaactgtaatttcattgacatcttcattcatatttaaaacaccattaaatgtccctgcaatattcacttgtttgtttaactgtggcagtgacttgtcgttaccatatgtcatcatatattgtgcaaatgttaagttccccattgagtgaccgacaaagttgaatttatcgaaattgtattcagattgtaacttagtcagtacatttttaaaccacgcagcattcttatccaaatagccttgtctgttattttcaagttcaattttcacaataggattcactgcatcttttcttagtttccctttaaatgtcactgcaccatcctttgaaacgtaagcagtgatgatatctttagttacccctcttttttctgcttgcttcaccataaacttttcagaattggcactaccaccaaatccatgtaagaacaatgttggaattggctttttaacaaattgctgttgttgtattttaaatgtttgtgcctgtcgttgactaaacaccaccataataatagagcctataataatagcgaccgctaacaatgtcgtaataattacaaaaattttcttcacacttttaactcccattcatgtcttttatataagtataaaggatgtgattaaaaatgtcctttagttgattttgaatacatcattaacttttaagatgactttggaaagttgtccgttaacgtttgttaattgattgcttctttagctttcaatggtgtgtcacccattgattaatatataaatatgtatatgcatgtttaatttatctctttctataaataaagacctaccagcactcgactgataggccttttaatatctataattatttaatttcttttgtttcggctaactctttgtaccaataagcacttttcttaggataacgttcttgagtctcaaaatcgacatagaataaaccatatcgtttttcataaccatttgaccaagagaacacatccattaatgaccaaataaagtaacctttaacatttgcaccatctataatagcatctgcaataacgttcaaatgttgtcttacataatcaatacgtgcatcatcatgaactgttttttcagattcaataaattcatctttatatcctaaaccattttcagtgatataaatcttatgatagttaggataatctttaacaacacgcatgatttgatcatataaaccttgaggatagatcatccagtcccagtctgtgcgaggtacgtcgacatcaaattcacgttgtccgacacctttaagttggtatttagaaccgcctttatcacctgtcgcattatgcgtgatttcagattctccatcgtaacctctcatccaatcactcatgtagtaattgatacctaagaagtcgtttaaatctttggctgcatctaaaatggcataatcttcatctgtaatgtttaatttaccgccattaacagataagatatgttgcacaccttccatcgtttcacgagaatacttacctaaatatgttgcatctaagatgaatttattatggatgatatcttctaattctgctgcacgaacatcttcaggatttgatggatcgaacggatattttgttggcaatgcgtgtacaacaccaatttctcctttgtatccgccatctttaaataattttactgctctagcatgagccaccatcatgttatgatgtgattggaatactttttcaaaatcatatttaatacctggagggaatttacctactaaatattgaccatcaccaataggtccaatttcattgaatgtagtccaatattttacttctgggaattctttaaaacaatattcagcataatctacaaagtagtcaatcgttttacgatttagaaaatcgccatctttgtgtaacacttctggtgtatcaaaatgatgcaatgttacaaatggttcaacatgacgtttatgacactctgcaaataacttatggtaatactcaacacctttagggttaacttcgccatatccatttgggaagatacgagaccatgcaattgaaattcggataccattaacaccgaatttttcacttaattctaaatccactggatatctgttataaaaatcactcgctggttctgcagtgtaccaatagttttcttctaaatacgtatcccatgctacgcgacctttaccatccgtatttgtcgcaccttctgcttgatatgctgctgttgctccaccaaaaataaaatcttcaggtaatgttttagtcatatgaaaaactcctattcttaattttcaaattgttgttgaacgaaatcaagggctgcttggccatctcgtgtcaatttgatatattcagcaccttgagtcttcgctaatttaatacctaatctatctgtatcttgcttaatatcttcatagttagacgcaacttgtggcgctaaaatgattaattggtactctttcataatgtccatatgtgcgccatatccgccagctgccgctttcactggcacatgatattcttcagctgctttattaagtgcattggctaataatccacttgtaccaccaccggcacaaagtactaagacatttgtttgttctgtgatatttgaagctttagctgcatcgtctgatacaccacttgccgctaaaattgaatcagcttttttcgtatcaaagtttgctgcaactttttcttttaaatctgaattactttctttacgtccttcttcttcatcaagaatttcactatcataaacttttaggaatgggtagtaaataataatatctacaacaatcaaagtaatagctagtacgaatgaccataaaccaaaacctgtacccatgataatgcccaatggacctggtgttgtccaaggtaaattcacactaaaactattcattcctaacacttcaacgaaaagtttgaaaatccatacgttaacaattggtgctaatacaaatggaataaagaacacaggattcaatactagtggtgcaccaaataaaattggttcgtttacaccaaagaatgttggtacaactgatgcacgtccaatcgctttgtttcgtttagatttcgtcatccacataaacatgaacgggacgaccaatgttgcacccgtacctccaaatgtaacgataaacatttgtgtacctgatgtaataattttatctgcgtgttctccagcttgaagcaacttgaagttcgcttcgatattcgcatatgtaatggctgcaattgctggctctacaattgacggaccatgaatacctacaaaccagaataatgcaaaggcaccaaagataattgtgacaccaatccatccatctgctgctgtaaataatggttcgaataattttaaaataccttccgctacatttgatttaaagctgttgcgaatgactaaatctaatgcataaagaatgatgattaccgctgaaaatggaattaagtccttaaatacttgtgaaatattcggcggtacttctttcggcattttaattgtaatattgcgcttcacacagaagttataaacaataacagttacaaatgctgataagaatgctgttaataaacctttagttcccataaatgcacttaagaatccaccatctttggctggatcagaagctaagaacaagaatccacacatcgctgctagcattgtagaaataaagttaatttgatttgtactttctagcttacggttaaatgaatctgttaaagatttcgctgtcgttcctgctactaaaaatgctacaagccccatcgtatagttatatggtttcattaaaatggcttccatgcctttatcccatttaaaaccaaatatatttggcacatatgcaattaatagaaagatacttgagaataagatgacaggcattgcagaaataaatccatcacggatggctcttaaatatatgttacgtgataatttctcgaaaaatggcttccctttttcaatttgtgcgatcaatttttgcatcattgtcatcaccctcttttataaaattctaataaatgcttcattaaatctttcagtaaaattgttgtcattaaatgatcttgaccatgcatcatcgttacactgtatgcaatatcatcaccttgcgcttctttagccaacaggcttgtttgtgctctatgcgcttccgcaatgcaattgtttccttcttcaatcagtgcatctgcttttgcaaaatctccagcttgagctgctgttaatgcttctaaaaacttagaacgtgcatcccctgcaaatgcaacaatttcaaaacctaataattggacttcttctctattcatagcattaatccccttttaaacttattttctttgtttccaagatgtcgcagtatcttttaatactttatttaagtcatcaatatttttgaaaccagttgtacgtaaccattcacgagcagcatcttcaccttgttcaatgtatacttgaacagcaccagaccatgtagcacggccacaaagtaccccgttgaatttagcaccagcttcgtgagcaaattttaaagtttcttggaataattccgcagaaacaccagcacttaagtaaatgtatggtaaatgagttgctgcatcttgatctttaaagtgttgtgccgcttcctcttttgtataaaccacttcaccttcagcaaagccttctacatatttcatgtttactggtacttcaactttcaatacatcaacgttaaagcgtggttctgagaataatttcattgcttcgttaacctttctaggcttaacttttgcgaattcaacactaccgttatcaggaatgttgtcatcgtatgttaatacttctaaaaagaatggaatatcttctgcaacacattctgaaccgattctttcaatgtatgctttcttttgaatgttaatttcttcagcatcatcaacatcatagtaaagtaagaatttaacagcatttgcgccttgttcttttaaacgttttgcagaccactctactaaacagtcaggtaaacgacctttagcgtttacgtcatatccagttttttcataagcaagtaataatccacaatctttgttacgtgcatctgaagctggtaaaccatattcaggatctaataaaattgaagatgcatattgtgttaattcttccgcaactaatacttttaattgttcaatttgagctacagttggttcttcagtttgatgttttgccatcatgcgttttaaagcaccacgttggtcaaatgctaatgcagaaatgataccttcgttgttacttaattgttcaattgatgcgattttttgattcgattttgacattttttacacctctaaaacttcaatttgattgaataaatcatcataattatttaaattgacataacctgtttgtgcttcttgtgcattcagcatgcctaaagtattggctttttttagtaaatcgtggtcgttttcatgattaagaattgctgaagtaattccagcaactgtagaatcacctgaaccaaccggatttaatacacttattgtcggaatattcactctatagaatgtatgattgtgcttagcgaatgcaccttgtgcacctaaagacacaataatccactcaatcccttcgaataagggttgtgacactgcctgtttcaaactttctaaactttcatcaagtggctggttaagcaattgatatagttcagaaatgtttggtttaatgactgtaggtttgtatggattttccaaaactgtttgcaaagttgcacccgagcaatctaatatcacaggcacacctttgttttggcatcgttcaatgatttgtgcataataatcttgatttaatcctttaggtaagctacctgaaatagcaactgcttcaactttttctaataattgttcaaaatgtttaataaatcctgcagcctcttgattatcaatctccggtccctgctctaaaatttctgtttgttgcccttcatgtaaaattgcaatgcagtttcgtgtttcacccttaatgttataaaatgcatgcttgatgtcggcatgatctaattttttagcaataaattgacctaattcaccgccaataaaaccactcgcaaggactggctcacctacttgcgcaagtactcttgttacatttaaacctttaccaccagctgttttacttacttcttgaacacgattaacatcatctaatttcaatgctgttaatgggtatgaaatatcaacggatggatttaatgttaaagttaaaatcatatgtgtcgtcccttaatcgtggtattcgcctctgtcccatttttctaagaattcatcaaagaaatgtggatcagcttgatctgcattgcttgtttctaaatgtttaattttagcgattaattttttgttctcttcagttggtttatattcagcattaataaatgcatcgataatatcgcacattaataactcacctataatacgtccaccgaagccaataacgttcgcatttaattcttctttagcgtataacgctgatgtcatatcacgtactagtgctgaacgaacgccaggtactttatttacagcattgttaataccaacacctgttccacaaatacaaacacctaagtctgcattaccgctaacaacttgttcgccaacttttttaccaaaaattggataatgtgttcttgtgaaatcgtatgttcctacgtcaatgacttcatgtccttttgattttaaaaattcagatacacgcatttttgtatctgtaacaatatggtcgcatcctaatgcaatcttcatagtaatttttcctccttagcacattttattaagcatatctacgcggatttggtgtctaccaccatcgtatttaccttcaacaaaacctttaacgacatttttcgctaatgtgtctccaacaatttcagatcccatagtgatcattcttgaattgttatggcctctagtcatatatccagagcgttcatctgatacttcagcagcaatcatgcctttgatttttgtagcaaccataaagctacctgcaccaaatgcatcgataacaatacctaagttaccttcttgactttgaacatcttttgctacagccaaagttgcatcaacaaagtcaacttcctgtccttctgttacgtcaacaacatcatatttattgtctaataagtatgatttgatgacttcttttaatcgtttgccagcttcatctgaaccaataataatcgccataataagactcctttttactttaattttgaaatacctttcttaaaatgtgacatatttatttgtaggttatgaaaatcttgagaaaaggctttcaatttgattacgtttaaattataaacataaacaaacaataaatcaacataatatgtttataatatgtttgtttatgacgtattttcaaacaataagtgaacattcatattgtggtgttgttttaattaggtattcgtctgaaattgtagtaaaactttgtcgaggttcccgttgacataaatttgcataaaaaatagcccataaatgaatgcaaattcacattcacttatgagcatatagatacatattttaacaatgcagttatacttttaatttagtcgactacttcaatatatgttttaatcgtttctactttttcttcatcttcatagtccatgaccactgcagtcaattcgtttaactgacaaaatgatgtaaaatcttctttgccaactttcgtatgatcgattaacaagtatttttcaattgaattacttagtgccagttgttgcgtataggcttcatctaatgtagatgtcatcacagcacctttatttactgcgttactactaaagaacatcttgctaaatcttagtttttccaacatggcgttcgccatttcacctacaaatgcttctgtaatatggcgcatttcaccaccaattaaatagacacgaaaatgtgctgtttgtttttctaacaaaattttatacaccggcaaacaattcgtaataattgtgagcgtatgatgattgacttcttctgctaatagttccactgttgttcctggtccgaaaaacaaagtatccccatcttcaattaatgatgcagcttttttagctataaatcgtttttctgcaatttgacgggtatgtttttctttatgcgatatttctttatactgaaatgttgaattactgcgtgcaccaccatgaatcttcgttaaaatccctttattttccaattcaattaaatctcttcgaactgtcatatcagacacatttaaaccttcgacgatttcattcgttcttatcgtgccctttttattcactagtttagcaatttcgtccaaacgttcatgtttattcaatgtaaaattgcctcctttatttaggcgatgggtcattatcctttatgtttagacatcaattttaatatacatgcttattctataataaaaattgcgtaaaaactaatataatttaactgttcgattatatgtataattcatttttaaaaagaactgtttaaactgcgcttttgataatcgtaaaatgaatatactataataaaagtaaaagacgttataaatcattcattattttgatggggtgtttaacttgaaacatgatttagagacactaaaacatattatagatagttcgaatcgtattacattttttacaggtgctggtgtatctgtcgcaagtggcgttccagatttccgttcaatgggtggcttatttgatgaaatttcaaaagatgggctttcgccagaatacttgttaagccgtgattatttagaagatgatcctgaaggttttatcaatttctgccataagcgcttactatttgtcgatacgatgcccaatatcgttcatgattggattgcaaaattagaacgtaatcaacaatctttaggtgtcatcacgcaaaatatcgatggtttgcactcagacgctggaagtcaacatgttgatgaattacatggcacgttaaatcgtttttattgtaatgtatgtcataaatcttatacgaagtcagatgttattgatagaactttgaaacattgtgataattgtggtggtgccattcgaccggacatcgtattatacggtgaaatgttagatcaacctaccatcataagggcattaaataaaattgaacatgctgacacccttgttgtactaggttcatcactcgttgtacaacctgccgcaggattaatatcacattttaaaggcgacaatttaattattatcaataaagatcgaacaccttatgatagcgacgctactttggtcatacatgacgacatggtttccgttgtaaaatcattaatgacagagtaatcagtatgtaaaaagcatttcccgaatggtagggaaatgcttttaattttggagttgcgtttttggaatttggagtttggttttcggaattcgacatttggaattcagaattataatgagtggaaaattttaattattgcgtgtttaatgacttggttttgtagcgatttttatttgatgaattgtttttttgtttgatgttgggatgctacttttaatggtttgtcatttgtaagattaaaaataaacataaaataagtagaaaaataaaagctacgaatattaaaaaattagatatcttcattatcaaattccgatattaaatcattatatttttcagaatatcttgcataatcttcattattattaaaagctagccatagacctctatcatcatataaatgatatattaagtttttagtattgttaattatatatatttcagaataattatcattctgattgatatttggaactaaccctttaaagtcttgattggatatagcttttaataattttttatattttatatcttttatggaacacttatatgaaaactcctcgcacaaaatattatcatccttctcctttttatattctttaaagtaatacaattcatctattgttaacgatgtaaatttttttataacatttgttttcttataaggttcactataaacatatactacatgaaccaaatttatagaatcagaaggcgaaaacaaatcttcaaaaatgtttattgcattatcatatacagctaaaaaataagtattattgatagttttaccgtcctccaaaaactggtatttatcgccacttaaacttaaatgaattgcgttttttacctttctaaaattcaacttttttatatccaaattatttatatcaaagcacataatttacaacaccttattcccttaagatttttccttctttagttaaagaagctattctttttcctttgttatttattaacttccaataagaaccaccatgtgattgccctttatttttggaaatagtccatttagtttttgaatctctccaggtaggatttttcccttaaaccttttgagtaaattcaccaatactcatccccttatcatttaacaaacttttattaatgtttttggttatattatgagtctttactgcttttagattgtaaaaattatcgtcataaatagtggcattttccgagattcaaatggtacaaagtacattgtaatatgcataatgatacctgtaattaatgtaataatagaaaagtgtatatatctcatatcgccacctgctatacaacttattaaataattaattccaagacatattaattatctaattataaccttagttacgttattacataatataaaaatatataataacttatttgcttgctcctttcactttttaagagtaaaaaataacctgaaacatagactttaacatccaagtttcaggttagtgtaatgtaaatgatttactttgttatattatgattaaacatctaattctctgcttgtaagtgctttaatcatctctggatcagcatgtgagaaaaattggctattactttcttctaatgtcgcaatttgttgtttatcttcttctgtaagttcaaaatcaaatatatctaagttttgagccatacgttctggattcactgattttgcgagtacaacaatgtcacgttctactaaccagcgtaaaataacttgtgcaattgatttgttgtatttatctgcaatggcctgcaacaattgattttggaataattgatttttaccttctgcaaatggtgcccaagcttctaccacaacattttcttgttgaagtgctgcaacttgttcttcttgttgatggaatggattaatttctatttggttcacttgtggttgaatttgattgtgaatacctaaatctacaattcgatcaacgccgaagttagatacaccgattgctttaattttaccattttcttttaactcttctaatgcacgccatgagccatatacgtcattgtaaggttggtgaataagcactagatcaagatagtccaaatttaatcgttgtaatgatcgttcgattgatttgatagtatcttcatagttaacattttcaatccatactttagtcgtaatgaatagttcacttctatcaatacctgaagcttcaataccttgacctacttcagtttcatttaaataactttgtgctgtatcaatatgtctataacccgctttaattgcttctttaaccgcttctgctgtttgttcttgaggaatttgaaatactccgaaacctaatactggtatctttacatctttacttatttcaatatgattcataaaatgaacctcctttatcttgtatgtccactataaaccatggagcgaactctatagcaagccataggtttactttctctcccaaagacgttcaacattgtcatcataattatcactagcattgattttagcaatatgattatcataattatcaattttatattgtagtaaatctctcgcatcatgaattgtctttaagttttcatttaattcttcgagttgcttatttaaaatttgcttttgctgtgcttgaatattttcatttttaggaagctgcgctaacctgcaaaattcgataagcgattcaatactgacgcctgcatttcgcaaatttttcactaaataaatccaatttaaatcactatcattatatattctatatccattttcatctcgattaactggtggaatcacaccaaccttttcataatatcttaaagtgtcttgagatatattcatgagcgctacgacttctttagttttcattgcgactatcctttcagttatgtttggtcgtctaaagtaatgttgctttatatattgtcatcttcgtttgaatacttcttattttattactcaaatttaaatttgtctcttttttaacattttacatttcatcgtttttaattactttaaaaattgtataacttaaatatttaaaatgatataatcactaagattgataatatttaattttttgaaaattattttagttgcaatttttgggtgatgcggaaaatttgggtgatcgattgtttatatgcatcaacattctttgtggattgtttgacagtagacagtcatttgtatacgttaacgaattttgaaaaattgaatcattatttaatcataatattcattgcgcacgcgcaacacaaaaaggagacatgtcaatgacatatagaataaagaaatggcaaaaattatccaccattacgttattaatggctggtgtgattactttgaatggtggtgaattcagaagtgttgataaacatcaaatcgctgtggctgatacgaatgttcaaacgccagattatgaaaaattgaggaacacatggctggacgttaactatggttatgataagtatgatgagaataatccagatatgaagaagaagtttgatgctacagagaaagaggcgacgaatttactcaaggaaatgaaaactgaaagtggtaggaaatacttgtggtcaggagcggaaacccttgaaactaattcttctcatatgactcgtacctatcgtaatattgagaaaatcgcagaagcgatgaggaatcctaaaaccactttaaatactgacgaaaataagaagaaagtgaaagatgcccttgagtggctgcataaaaatgcatatggaaaagaaccagataaaaaagtaaaagaattaagtgagaattttactaaaacaactggcaagaataccaacttaaattggtgggattatgaaattggaacacctaaatcattaacaaatacgcttatattgctgaatgatcaattttcaaatgaagaaaagaaaaaattcactgcccctattaaaactttcgccccagatagtgacaaaatattatcttctgtaggaaaagctgaacttgctaaaggcggaaatctagtagacatttctaaggtgaaacttttagaatgtattatcgaagaagataaagatatgatgaaaaagtctatagattcatttaataaagtcttcacttacgttcaagattctgccactggtaaagaacgtaatggattttataaagatggctcttacattgatcatcaagacgttccatacactggtgcttatggcgttgtactcttagaggggatttctcaaatgatgccgatgataaaagaaacaccttttaatgataaaacccaaaatgatacaaccttaaagtcatggattgacgacggatttatgccactcatttataaaggtgaaatgatggatttatcacgaggtagagctatcagtcgtgaaaatgaaaccagtcactcagcatctgcaacagtaatgaaatcattgttgagattaagtgatgccatggatgattcaacaaaagctaagtataaaaagattgtcaaatcttcagtagagtcagattcaagttataaacaaaatgattatttaaattcatattcggacatagataaaatgaagtctttaatgacagataacagtatttctaaaaacggattaacacaacaacttaaaatatataatgacatggatcgtgtcacctatcataacaaagacttagactttgcatttggtttaagtatgacgtcgaaaaacgtagcacgctatgaaagtatcaacggagagaatttaaaaggttggcacactggtgctggaatgtcttatttatataacagcgatgtcaaacactatcatgataacttctgggtgacagccgatatgaaacgtttatcaggtacaacaactttagacaatgaaatattaaaagatacggatgataaaaagtcgagtaaaacttttgttggcggaacaaaagttgatgaccaacatgctagtatcggaatggattttgaaaatcaggacaaaactttaactgccaaaaaatcatatttcatattaaacgataaaattgtcttcttaggaactggcattaaaagtactgattcatcaaagaatccagttacaacgattgaaaatcgcaaagcgaatgggtatacgttatatacagacgataaacaaacaaccaattctgataatcaggaaaacaattcagtctttttagagtccacagataccaaaaagaacatcggttatcattttttaaacaaaccgaaaataactgtaaaaaaagaaagtcatactggtaagtggaaagaaataaataaaagtcaaaaggatacacaaaaaactgatgagtattatgaagtaactcaaaagcattctaattctgacaataaatatggatatgtgttgtatccaggcttatctaaagatgtctttaagacaaaaaaagatgaagtaactgtcgttaagcaagaagatgacttccacgttgtgaaagataatgaatcggtttgggctggtgttaattatagtaatagcactcaaacttttgacattaacaacactaaagtcgaagttaaagccaaaggtatgtttatacttaaaaagaaagatgataacacttatgaatgtagcttctataatcctgaatctacaaattccgcttcagatattgaatctaaaatttcaatgaccggttactctattacaaacaaaaatacgtcgacttctaatgaatccggcgtgcactttgaattaactaaataagcaagaaaatctcgacactataccatttttatagtgtcgagattttataagtatcgccatcattcagcttgtaatccgcagaccacatcccctttgataagttctcgattatttataaatcgaatttttaaagatgtacatgcttcaatattcttatcattcattacttgaaaatgtatatgaggttcagtagaattgccagaattcccaaccttcccaatgatatcaccatatttaacattttgcccctcattcacaatgattgaatattggtgtaaatgagctattaagctatactcattttctgcgtgcttaattacaatataatttcctaaaaactgtgattcattcgtacttccaatactgttgtcttgaaccccattcactactttttcaactgtaccatttgctggcgcaatgatatcttttccaaaacaaaaataatcagtatttacttttccttgattcttatatgttttatgattttctttaataactaaatcaatagcatacctttgatgtgggtataaatagtgataattatataattcattatctccaccccaaaaaatctcatagcaatctgttgtcggcactgcgtattttaaagtcgtttcattcttaatcgcatcataattaattaacggacgcataacaaatccgataatactattatctttccaagtcactgacactccaaattgatttgcttcatctatccatatttgctcaatagtaccatcattttgagtacacacttttaattcatgtacatcagactgccttgtataagatttgaaaagtttcctaaactgccaataactaaactctcgcttcaaattttgatcaaaaatcttatatattttcctgctcttacttttatttaaataagccccaaagtttgttttattcatatatacttaacctattatattaattttggtatcaattctttctccagttcctgcgtcatttttgcgctacctgaatcgtctacacttaattggataaatcaacatataaataattttttaaagctaaagtgtagtcgattcaccatattttctaatcatcccttaaatattaatatttgcacttaaaaagtatacatatcactcaactaatcaataatcatacttaccttcaacaaattctttaacatgcagtgttatcccttgataatatggatattttgttaatctaaatttctgctttaatgcttcatctctactattcgacatcaaatatgcatgttcaagatagcttaaatatgcttcgtcattgccgctatctccaaaacctaatattgattttactggtatattatatttcctcatcagaaattgagtagcatataattttccagcatttgacggtgtgaagtcaatatcatacgcattttcaggatcaccagctaatggattgcttcgactaaatctcgctgtatagttttggtcatttgcgtatctgacaagtgcttctaggatacgactatcattgttgtgattacctgttgaatgaaaataaaaattataatgtgtttcattaccttcaaatgctctttgtggaataaattcgacattatattgcgcagaaatatgacgtaatatatcttcaatatcttcaaataaaaatggttcgctcaagactttctttttatatgtttctgattcaacatattcgccattattccaagtgaacattttagaactcaaatcagaaaagatatgtaatggtttaaacgtcatattaacttgatccattttatccatgacactttgaaatgtacttcctgtcaatacagcagtgatcacttcattattattagttagtttttccaacaatttttccatttctcttaaatgacttaaatcttcttcatttgtattatgtttaaaatatgtttcatcaaaatcaaacaataatagacgctttgacatactcattcccccataatattttaatgaatttatctataacttaaatacactataagtctcaattaaaagtataagatcgactatatgcttttcatgattattatatacaactaatcaatccctataaactaaaaacattgcttaccacttttcaaaatgcacgagtcatatccctcgttaaaaactattactaaaaattaaaatataaaaaatgcaaaaagtatgttttaaactttatgaaacgtgttatacaaatagtgtaatatcatacaacccgaaaaggagattgagatatgaaactaaaatcatttgttactgccactttagcattgggattattatcaacggtcggagctgcattaccgagtcacgaagcatctgcagatagtaataacggctataaagaaatgactgtggatggttatcacactgttccttacacaatttcagtagatggtattactgcattacatcgaacttactttatcttcccagaaaataaaaatgttctttatcaagaaattgacagtaaagtaaaaaatgaattagcttctcaacgtggtgttacaacagaaaaaattaataatgcccaaacagcaacttatacgcttactttgaatgatggtaataaaaaagtagtgaatctaaagaaaaatgacgacgctaaaaattcaattgatccaagtacaatcaaacagatacaaattgtagttaaataataatttgaaaatagttttatagggcaagcgctgaaaaattggcgtttgtctttttagttattgaacttgtaaattattgttgtttgcttctcgtagtaacagattggcctatacaatagtaaattttatatgagtgtgtaccacaatttataatctaaacataacagcaaatctcaaatatctggaacctaataaatcccctcactactgctaatagtgaagggatttattttattacttagacgtaattataaatatatttgttctattgtagtcatggttaatcatatttacaaactatcatttctaaatcgcgcattatgaagtcaattttcataaaccgtcattatatttctggattcattattcagcttctctaatttcgtctgcaatatctttatagtcaatatttgctttagtgaaatctttatcttgaattggaaaatgctgttcaaatgtttctatattttggatttctactttaacatcttctacttcaaaatctaagacatgtccaccaaagttacgatcatcattcgcaaagtgtacatgaaatcctgctgatccgataccatggaataattctggtgtaaagaaaccaacgactgaacctttgacatacgtttcagtttgttcaggttgtcttctagctgaatcgattaaacgtgtataaggtggttcttgagccggcatcatacgtacatgcatttttttaaataagcctgaaatttttactgctgaaaataaattttcactcaacatcttttccttaatttctgcaaaaactgcttctgaagatttatctttcgtttcatagcttgtatctgctacaaatttagttacagttgcatatggtgttaactcgtcaccttttaattctacaaattctttatgttcatttgcatggtaagcttttccatctaaaaagattacctcaccgtttgaacctgttagtgtagcgatacctaagtcaccatgttgcaataattcatttattgatgcagttccttttaataatcctgccattaatgtgcctaatgtaccatgttggtataaaacattagtcataaaatctcccactcctctttaacatttatctttattttagttaaatacgtcaggtaacatatttgttgaaagtttgatattatctttgtaatttacaggtatatcaattaatactggaccatctgtttcatagccctctttaattgccgcttctaattcttcttgattagtaactcgtaaacctttcgcgccaaatgattctgcatattttacaaaatctacaggaccgaagtctacacctgacgaacgtttatatttcatttcttcttggaattcaaccatgttatattttccatcattccaaataagctggatgatatttaaatttttacgtacggccgtttctaaatcttgtgatgaaaataaaaagccaccatcgccagcaacggacacaacttgcgtattagggcgcacaagtgcagctgaaattgcccacggtaatgctacaccaagcgtttgcataccattgctaaataataaatgtcttggattgtaacttctgaaattacgtgccatccaaatatagtgacttccaacatcaactgttacagtagtatcatcagttaataccttttgcatagattcaataatttccactggatgtagaattccttcttcatgcgtcgctttaataccagtttcttcatcaatatgtgttcttaattgttctaattcgtctaaatgttgttgatttataaatggttcatccactttttcagaaatcatttcaatcgttttagcaatattaccaatcaactcttttttcggttgcatataattagtaatttcagcttgaacttcgtcaatattgataatttgtgtttctaattctttattccagttactagcttcgtattcaattggatcataaccgattgtaacaactaaatcacttttacgtaataattcatcaccaacttgattgcggaataagcccacacgaccgaagaaatgattttctaattcacgactaattacacctgcaccttggaatgtttctacaactggtaaattcgtgcgctcaactaatttgcgaatggcatttgtttcttctgcacttgaacttctcataccagctaataaaacaggaaatgatgcatttttaatcgcttcaatgacatcattaatatcttgttcactcggtactcctaaatttggtttttggcaaagtgatatagctttagattcaactggtgaagaaataacgtcttgcggaatactaataaaacttgcgccattttttcctgaagtagcaattcgaattgcatttgtcataacttctgataatgattcaggatcttgtacttcttcactatattttgatgaatattttaatagcgcagcattatcaatactttgatgcgttaatcgtaataaatcattacgtttcacttggccacctaacgctaatacaggatccccttcagatgttgcggttaataatccagtagttaaattacttacaccaggaccacttgtaacaagtactacacccggtttgcctgttaatcttccaataccttgcgccatcattgcggcgttttgttcatgacgagtgacaataagttcaggaccatcatcaattaaagcattaaatagatagtcaatctttgcacccggaataccaaaaacatattctaccccattatttttcaaagtatcaataaccatatcggctgcagtgtactttttatcagtcatttatattcatttcccttcaaatgtgatgtatagatgtgtattacatgtaattactttgtgatttgtaatctaatgatagttacgcaaaattaatgatgtttatcaaaattttacatgtacgattagatttgtaatacataaaaattgccttcagtacattatataacctttgttagatgaataaaaatcgttatttgtaatactaagtattccaaaaatgcatgaatagattttgtgcgttgtgattatgagggatgttggattgattgatgtagaggattgttacgatatttttgggatgtggtgtttagtcaatggcgggctgaaattgtcgttttatggtgggctgaaaatgctgttttatgtcgggcttgaatttgtcgttttatggagatataaaaagccacagcaagacttagatctaactgtgacttatacatttcatacttatatttatcgattggttttatagttataaatgatagaagcagttcctaaacaaattaagaagatactcattaaatatatagaaaagttatctgttttaatataaaacctaaaaagtagaaacaccagcatcgcaacaataaaataaacaggaataaaagctttcttccaaaatatagaatctttcaattaagtcactccttattttgataacactcttaaatcatggttcttgagttatcatctggttatcatccgatagctctttcccttgaatatctattattagaacactatcgtacggtctccgcaagctaaatgacaatttaataatgtacacttttgattgtgtaagcatgtacaaattatacgtgtaaatcaataattcatagttgaattaattctatacctgagacattaattcatttatactctattccatattccccacacaaacgcaaaaaaacacctcgacataacatcgaggtgttttgtatatatatcgtccgacaattaacgttttgagaattgaggtgaacgacgagctgctttaagaatttgtttttttacgttcagaaaattttagaatttcgcatgattatatagactgtcgtacaccttgatattaaaggatttcttcaattttgaatttcattgattttcatcaaattgaagcaaagggtattaacggggtattaattttttaaaaaaatctgctggtcggtggattcaataattgatcttatttactgtatttgacttctatacttttgaaaaaattttctatatcaactttatccatatttaaaatatctttattgaacacacaatgcaaatatggttttgcagaaaaaaagtattgccttcacttatcagttgataattaacatccttaaaatttaaataaataataataccatcattttctttggctaaattctttattttcgaagaagataaagaattaaactcctcattcacatgttgtttattatattctggtttaaaaaatgtaattaatgatatctctgataaatcaatatattctttattaggtatactttgctctaaaattctttttaatcgagacacagcctctttaccatattggtttgtaatataaatattgtcaggctgtatcttgtaaaatattaagacagtctttctattttctggctgataagtcataatttcttgtaatttttcatgacctttccctattctatcaatgacatttctattaccctctgtaccaaaagattgcccaatatataaattagtaatttttaatgtagtatcatctctgtttgtaaaatattcattatattttttataccccattatgttccaaacgtcttcagagaatacttttatcaaattatcactatatttataaacttcagagtaatatactttatccaatacaacgttttttttatattgttcaaatacttttgagtacatactacaatcatcagatatttttttatcatacgaggatattaaactttctatttttttatgaattaacaatttttgaacatttaattttttaaataattcatcaatatattttttccatacttctttgaaatttatttcattttctagatatttcattaaaatttcattaaaactatctaagctctctctatattctgatgattcgatttttgtattgaattcttctttaacatagttagaagaaaaaacaatttcaaatattggtttaataaataaaatataaaaaccatactctacatcaaacttgttttcgaataaatgttttacaattttctccaattcaccacttaagtatacctcaatattgtaaccattaattttatacttcaaatcatcatctcttatatcatttaattcaaatatatctcttctgaatataatattctcatgtatatactttgaaatgtcaaatatacaatctttatttgttttcgtatttaatatagatattcttcctctatcaagtaatttcattgtatattcatctacatagttgaaggaatataaatataaaggtagcttagattttaagaaaaattcttcttccttcattttataaaagtcttccattgttattattttagtacctattaactctacatttaaaaaattactattattcatttaatttacctttatatattaattaaattttaaaattattaaactcttaacttatactacttacaaccttacatagatagtactttattaatagataacttatactaaaaaatataaagcatataaattaatctataatatccgtattaaataattcatcttcaaaaattattgtataaatatcatttgttattattttctttaaatacctaatgttatcgatatctatttctgtctctttatatttctctaacaagttatatgcggtaactattcttttttctttttcatttagagatgatagtatttcatttaatttattttctattactttctgcttttcttcctgtgttaaatataaaaatttaatacaggaatctattctagaaaataccggttctccaatattaactattgcttcttcaatactattaaaattagatgttagaatgaaaatacaatttgaaacgtctactttataattggcatcttcaataataccttcatcaaacatttgatagaaaacattgtaatagattggtaataccttatcaaattcatcaattaaaacaacattagtttcacgatctactaaatcttttgacaatgatactttggcatgttcatctccaaagatataattaaaagattcatcattctgcatcatagaaaattgtattctagtgatattacctttatatttttttgctatttctttggctaattctgtttttccaacacctgatggaccatagtaaagcattacggtcggtttattattttctaaggaagtatgtttatataaatctatgctcatttgttttttagcgtctgtttgacctattattttagaaccagccatctgctctttataaaaatttattacatcatctttttttaatgttgtatattcatagtttatttctattatttcagaatcgtgaaaactatttagtgattgaaatactctttttggaggattctgaatatagattttcttaatatttctacctaaagtaacgatatttataaaattagtaataacatgagttgttacagaagcaaagtcgtttgaaaatatcacaagattttctatctcagtatcaaaaataccatcaacatcatgagttccaaatgtatcacttgctcgcactatgatattgtattctctgattaattccatgaagcggtgatattctttaacttcagaattaatatattcattaaatccacaaagcggtcccgtataaacatgaatttccatttatttcactcctgcaagaataacatcatacacttgatatttatcttctttagttgcttctgatctaattcccttaaactttccaattccactaggtttggcaccttgatttagatcaaactctttatcgtaatttagattttctttgcttatttcaccaacaagtactgagtagagtgttaaattcataaattttaaatcttgtattctatagttatttttaaaagattctatattaaatctaaaaactctgttttcattccctcttgttcctattaattcaaaatagcctttaatacttctaatcgcttcattcatttttgaaacatcaaatgatagctcctcctcgtctagatgtttagatccttcaaacatacttgctatgggggtaatagtcgcgaaatatgtcatcgtatcttgttgaatatttagtttaaacccctctgaaatatcaataatagtttttttctttctaaactctactgtatccaaaaaatcatatattaatgtattctctaaaattgttttggctactcgctctccagttatatttccatttatacctgcactagccgaagcactcgctgacatcccaagtaaagaatcaaaaatttgttttacagcgctttgcttaccaaattccatgttcactttagattcaccacttgcactacctttttcatcatgcatcaactgaactgttttagtaaggttacctttcttctctatctgtaataaatccattgctgatagttcatcaaaataaattatttttttgatagtatttgtcaatatatcctctccttaatctaatacttcaaaatctggtaatttatctattaatccaagagttttcatacttacagtaataactgataaaagcagatttaaaatgtaattcggatcttcactaaattcattaggatcatctaatattccagatttcttgtcgatgcttacgttgtactgatctataatccattcaatagcaggcttgccattcacaatataattatatactttatttggaatgttagtaactgtaatatcggtattgtatattactgtatccaacacgccctttttagggtgcttcatttttcaactttataattcggattcatattattataaattatttctacaccatcccaattgagttgtttttcataatttaaatgtaattccactaactccctaccaatttcaacaaatccatatacatcctttaatatcggtattcgcggaaaacctttactcaaatcacttgaatatttgttcacataatatttatgatgcaaaattgcatatatataatatactatctcttctgaattaagatttattttctttttaaaagaattagaaatattatctacaagcctcaaactatctttacctttgtatgtagcaaagcctttgccattaccaataaattggaaattaggtaatatgtccgtgatcatagccgagaattctttattcattccctgtccttgtatataaatcacctgtccagtattctccattatattataatatctacttggcatttccataatatttttgtcgtacactatccatttttttgtaaatggtctatgcataaatttaacaattctctctggattaattgaaatattttttcctttagaaaatttttgggtaagtcctcgtgtccaactaataaatgtttcatctttgttcactaaatttatacgttctcttgaatctaagatatcaattaatctatctatttcagaattatagttatctacaagtaattttgcatttactaatgctttttcattcgaaaaatttgttacccaattatctcttgctgaatttactccattaaattgatctaaatatatagaattttcaatatccttggaatcatacattggtaaataattctcatagtttatgtctcgttgattaatccaatcattgtttttatcgggtaaaacattcaaacttttcaaattcacaattgattgatgtttcattaaagtatctaatttttgctctctagttaaatattcaccaatgtcattataatagatatcgtgattgtaacttccatctttaactaaaatagatatagctatcggtgctctacttcctgatccaaatatttttccaccttcttttcttgatttttcaccctgtgttcgttggtcgcctctcaaattaattatgtacagatagttaaattcatcgtataaaacttttctaaatccatcagtgctttgactatcaataaatgatccatttgttacaaatcctataataccttttttccaactctatcagttgcccatcgaaaagcctgtatatacgaatcatataatgatttttttaaatttgctgttgaaaaatttgcataggtatttgctatttttgcatttaatttttcatattcatttttttattatcattatttacactagattgaccagcagaatacggtgtatttccaattatgacagtaatattttctttttgttgtttttttaaccttttatcgtttagagtaaagtattcaaatcacttcacttccaaaaaaataacagaatatcaactatttattgttctccacatttcatggttcttcatcttttatggtgggaaggtaaaaattcatttatattctacacattccatattcgccgcaaaaacgcaaaaaaacacctcgacataatatcgaggtgttttgtatatatcgtccgacaattaacgttttgagaattgaggtgaacgacgagctgctttaagacctggttttttacgttctttcatacgtgggtcacgagtaagtaatccagcgcgttttaaagaacctctgtattcaggatctgcttctaataatgcacgagcgattccgtgacggatagcttgagcttgtccagtgaaaccaccaccatgaacgttaactaaaacatcatagttacctttagtttcagttacatcaaatggttggtttaagtctaaaattaatgattcgaatggtaagtattcgcgtacgtcacggttattaactgtgatgttaccttcacctggtactaaacgtacacgtgctactgagtttttacgacggcctgtgcctctatattcaacttgtgccaaagtcatttcctccttctaattaaccacgtaattcgtagttttctggttgttgtgcagcgtgtggatgttcagcgccaccatatacaaataattttttaccttgtttttcgcctaaacgagtgcttggtaacatacctttaattgagttttcaattaaacgttctgggttagttcttcttaattcaccagcagtgattgatttgataccacctgggtgatttgagtgacggtagtaaactttgtcagtttctttgttaccagtaaattcgatttttgatgcattaataacgattacataatcaccagtatcaacgtgtggtgtgtaagttactttatttttaccgcgtaagatagatgctacttctgatgataaacgacctaatgtttggccttcagcatcgataacataccatttgcgctcaatgtttgattcatttgccataaatgtttgacgcataataattgtcctcctaaaaaataaatgcttctattcaagctataaacagtttcataacctaatagatgatttcatttgtttcatttttaaaacgtttaatttcatttattttgttaactgttgttcgtttctgcttatatatcttgtaacacaataagtttccggggcttatcgtggggtggatataaaacaataccgttaataatcttataatttcacaagctttttgtcaatggcaatcagtcattttgtaatgattttttacgatgtattttgatatcgttaccaaagtcttttaataactcattttcatctaaataaattttctctaaatataatccttcagccggtgcagtgaaaggtacattcttacgattctttgattcaagaagttttggtacatcagatacttcatgtcgcccttttccaacttctattaaaaatgcaactaagacacgcaccatgttatataaaaatccagatccagtgacaatataatcaaagccatcatctgtctttacgatttcactttggtataatgttctaactttgctttctacttcagttttttgcgaacaaaatcccgtaaaatcatgtgtacctatgaattgttgcgccgctctgttcattttacctaaatccaacgtttcaggaataaatgttttcaaaccactttgaaatggatcgcggtgttgtgcttgatatactttgtagcgataacgtttacctacacaatcataacgacaatgaaaatcgtcatcgactgtaactacattgttgacataaatatcatcaggtaacgttcggttcattgcatattgccattgtgacataggtatattcagctctgtgtcgaaatgaaagtattgctgtatcgcatgtacacctctatcagtcctacttgaaggatggattctcacatgtcttttatgcatgcgttgtaatagcttttcaaattgttgctgtaccgttcgaccattttgttgaatttgaaaacctagaaaattatttccttgatacgcaatttctactaatatacgcatgaatttacactcctgaatattttaatacgaataaaataattgcaattgggataatcatggttaaagatatcgtatctctcaattgccatttaagctgtctgtagctcgttctcttaacattggcatcataacccctaacttccattgcgaccgctaattcttcggcgcgttggaaagctgagatgaatagtggcactagtaatggaataaatgatttaatacgtgttgcaatgttccctgaacttatttcagaaccacgcgacttttgcgccaaaatgattttatctaactcatccattaacgtcgggatgaatcgtaacgcaatggacattatcatacttaattgatgaactggtaatttaaacatctttagtggtgcaagtaatctttcaaacgcatctgttaaatcaattggacttgtagatagtgtcataattgttgcaatcattacaatcccaattaaacgcagtgatatatatagcccttctaaaataccattagtttcaatcgtgatgccatgccattcaactaatacatatccacctttagttaaaaatatatgcatcattaatgtgaagattaaaaagaaaaatattggtgttaaacctttgattaggaaccataattgaatttttgctaatctcataatgaataagataagtgcaaacacccaaagatatgttaatggtgaatgacagaaaaatattaatataataaaaagaaaaacaaacattaactttgctcttggatcaagatgatgaacaaaagaattaattggtaaatatcgccctataatcaatttatttttcatgttgccactccttatacaagcttacaaatgcttcttcagttaaggcaatatcttttaattttgtttgatatttttgttcaaagtcatattgtaactgaacaatttctggcaaaccaatatgccaatccgccaatttttttttatctttgaagagctcttttggtgatgtttgcgacactatactaccttctttcataacgatgacttcatctgcataacgcgcgacttcattcatatcatgtgaaattaggataattgccttattttcatctgtttgtagtgactttagtaatctcattacttgtcgtttactttgtggatcaagtcctgctgtaggttcatcaaccacgataatatcaggattcattgccaatatcgatacaatcgctattttacgcatttgtccacctgacatttgaaatggtgattgtgacattacatctcttgaaaagcctaaatccatcaacagacgatgggcatagtttttggcttcatctaaattcattttaaagtttttaggtccaaatatcatttcacgctctactgtgtcctcaaataattgagattcgggaaattgaaataccattccaattctttttcttacaggtctaatatatttatctttggtcttatgtgtaatagtaatgtcatcaactgtaactgtcccagtagtcggctttaacagcgcattaatattttgtatcaacgttgatttaccactacccgtttgtccaacgatggcgtaatatttaccttgttcaaattctgtattaacatcatgaatagcttgatgctgatatggtgtccctttttgataggtataacttacattgtcaaaccgtatagtcatagttgatccaccagcccttcataagttaagaatgatgtttggtgtcccagcatttgatttattttgattgggaatggcaaatctagacctattcttgttaactcttctgcattgtcgaaaatttcagtcgctgtgccttctttatagacagtccctttattcataacgataacatgatctgcttccatcgcctcagataaatcatgcgtaatagaaatgattgtaatattatgttctgatttaacttttctcactaaatccaataaattttgacgtgcatcaggatctaacatagaagtcgcctcatctaatataatgacagaggggttaagtgctaatacacttgctatagccacacgctgcttctgtccccccgataatgcattaggttcataatctgcacgttctaacatatcaacttgtttaagtgcttcgctgactcttctatgcatttcgtcatatggaaccgcatgattttcgagtccaaatgccacatcgtattttacaattgaaccaacaaattgattatccggattctgaaatacaattcctatgtcttttcttaacttttcaaaattatcatcagttatagcttgattattataaaaaatttctccagatttaactttctctatgccaatcattaacttggcaattgtagattttccagaaccgttatgaccaacaatagatgtccactgacctttaggtatattaaaagaaacatctttcaatgtgaaggatgcatcactttgatattgaaatgaaacatttttaaatacaataactgaattcttatcctccacttgtctctctcctttacgattcgtgtatctatcatattttacaatatttataaatcgctgtatatgacattgactgggttctctatatattactagtattttctgactcatttctagtctttaaagtgttgtttaacaactaatgataaggacttttattcctctctaacaattatgtataaacgttaataaaataaatgatttactaatataggggtggtcgcgtttgattcaacgataatactttcacttcattcagttctagtgaaattgatcaaactagcttcatcatatttttagattcgcactcaaaaaagtaaatataaagaaatcggacttaaaaacatttctgttcataagtccgatattttattcaataaaaaagcgcgcaccccatcataagtttgttgagttcacgctttaaatctttatttagttgatggggtactctgagctagacaatatttgtatgtggcaaacattatcgttgcactcatttgctttatataaaagtagttagtgtatttatataaattcttatactaattcgataattactgattcagcaccgtcaccgcgacgagggccttgtttaaggatacgagtgtaaccaccttgacgttctgtgtaacgctctgcgatttcaccaaataatttttgaagtgcagtttgtgtagtttcatcttcgtttaagatttcaacattacgtaaagttttagctgcattacgacgagaagctaaatctccttttttacctaaagtgattaatttctcaacaacactgcgaacttcttttgcacgagcttctgtagtttcaatacgttcactaataataagtgatgtagctaagtcacgtaacatagctttacgttgatcagaagtacgacctaattttctgtaacccatgagttaacctcctttatcaatcttcttttcttaatcctaatcctaaatcttctaatttgtatttaacttcttctaaagatttacgacctaaattacgcactttcatcatgtcagcttcagatttgtcagctaactcttgaacagaattgattcctgcgcgttttaagcagttatatgaacgtacagataagtctaattcttcaatagacatttctaatactttttctttttgatcttcttctttttcaatcatgatttcagcgttttgcgcttcatcagtaagaccaacgaagatattcaagtgttcagtcattatttttgctgctaatgaaactgattcttgtggtgtgattgaaccattagtccaaacatccaatgttaatttatcaaaatcactgctttgacctacacgtgtattttcaacagtatagttcacacgttcaacaggtgaatacaatgaatcaacagggattacaccaattggtaaatcactagtattattttgttctgctaatgcgtaacctctacccttgttagcaactagacgaatttttaagtgaccacctttagatactgttgcaattttaagctctgggtttaaaatttcaacatcactatcatgtgtaatgtcgcttgctgttacttcgccttcatcacgtacatcaatttctaaagttttatcttcttcagagtaaattttcaatgctaattgtttaatgttcataataattgtagaaacatcttcaactacattgtctactgctgagaattcatgtaaaactccctcaatttcaatatacttaacggctgcacctggtaatgaagatagtaggatacgacgtaaggagtttcctagtgtagtaccgtagccacgttctagtggttcaacaacgaacttaccgaatttagcatcttcactaatttcaattgtctcaattctaggtttttcgatttctatcatttaaatatcctccttatatacgtcgacttaatttaaaatgtttgctcagtgacctgtaacaataccatcataaattatacacgacgacgttttggtggacgacaaccgttatgaggtactggagtaacgtctctgatcgcagttacttctaaacctgcagattgtaatgcacgaatagctgattcacgacctggaccaggtcctttaactgttacttcaactgtttttaaaccatgctccatagctgatttagatgcagtttcagaagccatttgtgctgcaaatggtgttgattttttagatcctttgaatcctaatgcaccagctgatgaccatgataaagcattaccgaactcatcagtgatagttacaatagtgttgttgaatgttgaacggatgtgtgctacaccattttcaatattctttttcactctacgtttacgagatacttgtttacgtgccatttaaaatttgcctcctttacctattattttttcttgttagctaccgttttaactggtcctttacgagtacgcgcgttgtttttcgttttttgaccacgaactggtaaaccacgacggtgacggataccacggtatgatgaaatttccattaaacgtttgatatttaagttagtttcacgacgtaagtcaccttcgactttataaccgtctacaacttcacggatgcgacctaattcgtcatcagttaaatctttcacacgagtatcagctgatacgttagcttcttcaagaattttttgagcagttgacgtaccgataccgtatatataagttaatgagataactacgcgtttttcacgtggaatatctactcctgcaatacgtgccatattaatttacacctctcttttattaaccttgtctttgtttgtgttttggattttcacaaattaccattactttacctttacgtttaatgactttacatttttcgcaaataggttttactgatggtcttactttcatttttatacctccctatattatggagtgacgattatttataacgataagtaattcttccgcgtgttaaatcgtacggagacatctcaacagttactttgtcgccaggtagaatacgaatgtaattcattctgattttaccacttacgtgagctaaaatctcatgaccattttctaattctactttaaacattgcgttcggtaaagtatctaatacagtaccttctaattcaattacatcttgtttagccattgattaacttccccctttttgcaatagtaaggtaatcgtcaatagacaactttattgttacgaatctatcagtgattaattttataagttaaacaaaaattacgggaattaattatcgttaattgccactctcatctatctaatatgattaaatcatgcctcacttaaaatagaccgctaaaagttgatctattacaaatgatctaaaatatcaatgacatctttggtaacgtcgctaatatcttttgaaccatcaatatttttcaatacacctttttgatcatagaaatctaaaataggcttagattgtttaatattaacactcaaacgattagctaccgtttcaggattatcatcttctcgttgatacaatttaccaccatcgatatcacaaataccttcgaccttcggaggattaaatacaagatgatacgttgtaccacatgactcacagattcgacgacctgtaagacggttcattaattcttcttccggaacttcgatattgatgacagcatcaatgtttctgtcaagctcagacataatattatttaatgcctcagcttgctcgattgttcttgggaagccatctaataaaaagcctttttttgcatcgtcttcagaaattctttccttaacgatacctacagtcacttcatcaggaactaattcgccacggtccatataagacttagcttctttacctaattcagtttcttcttttatagcttttctgaacatgtcaccagttgaaatgtggggtattgggaatttcttgacaatttcacttgcttgagttcctttacctgcgccaggtaaacccatcaaaatgatattcataagtgccctcctaaaattatctaccaccaaagcctttatattctttttgagatacttgagcttctaaagatttcattgtttcaatcgctacaccaataacgataagtaaacttgtaccaccaatctgaattgattgtggtaatcccataaacttagttgctaatatcggtagaattgaaataacggctaagaagatagaacctacaaaagttaaacgatataaaactttagtaatatattttttggtttgttcaccaggtctaatacctggaacatagctaccttgtttcttaaggttatcagccattttttccggattaacttgtacaaatgcatagaagtatgtgaatagtataattagtacaatatatacaaccataccaacattacttgaaggatttgcagcattcgcaatgttttgtgcccattctttatctggatagaacaacgttaatgttctaggcagtaagaagaacgccattgcaaagattacaggaataacaccggctgagttcacttttaaaggtagataagttgcctgtgaacctaatctttgagcagtttgtttcttagcatattgaatcggaattttacgaacggcttcaagtacataaatagcacctacagttaatagtatcagtgacactaaaagtcctaatactttcaaccatgctaatgatgtatcttcttgcccaacgaacgcagtttgtccaaattgaattagactggctggcaacgttgataaaatacccgcaaatatgataatagaaataccattaccaacaccgaactgagtgatttgatcaccaagccatattaagaaagcagttcctgctgtcaaaactagtgctattaataaataactcataattgactgattgataatcagcgcacctttgagataattattaaattggaatgccatacctatagattggataaatgctaaagaaattgctaaataacgagtaacgttatttaactttcttctacctacttcaccttgttttgcccattctgagaatttagggacaatatccatttgtaataattgcattacgattgatgcagtgatgtagggtacaatacccattgcaaaaatagaaaatcgtttcaaggctccgccaccaaaagtatttaataactcagtggcaccttgagaaccttggggattatcaaaagctgcaggatttactcctggagctggtatataagtccctattttaaaaattactaacattgctagtgtgaagaaaatcttgttacgaacctcttttgttctaaagaagttcacaagggtttgaatcattagatcacctcgtgtgctccacctttagcatcaatagcttctgctgctgaagctgagaatttatgagctttcactgtcaatttcttatcaagtgaaccattacctagtattttgataccagatttttcattcttaacaacaccagattctactaataaagctggagttacttcagtaccatcttcaaatttattaagttggtctaagttaacaatagcatattctttacgatttatgttagtaaaaccacgttttggtaaacgacggaataatggtaattgaccaccttcaaatcctggtcttacaccaccgcctgaacgagctttttgacctttgtgtccgcgaccacttgttttaccgttacctgtcgcaacaccacgtccaacacgattgcgttctttacgtgaaccttctgccggttttaactcatgtaatttcatttcggcacctccttgattatttttcttctactgttactaagtgcttaactttgttgatttgcccacgaatagcagggttatcttcaacaactactgaactgttagtctttttaagacctaaagcttcaacagttttacgttgtgtttcaggacgaccaataacactacgagtgagggtaatttgtaatttagccataactagttttccctccttaattgtataattcttctactgttttgccacgtaatttcgcaacatcttcagcatttttaaggttttgtaaaccatcgattgtagcacgaaccatgttgattggtgtgtttgatcctaatgatttacttaagatatcagtgatacctgctaattcaagtacggcacgaacaggaccaccagcgataactcctgtaccaggtgcagccggtttcataaatacgcttcctgaaccgtaacggccagtaattgtgtgtggagttgtaccttcaacacgtggaacaactactaaatcttttttagctgcttcaacagcttttttgattgcttctggtacctcttgagctttaccagtaccgaaacctacacgaccatttttgtctccaactacaactaatgcagtgaaacggaaacgacgaccaccttttacaacttttgctacacggttgattgtaacaacgcgttcttcaaattctttcgtctcttcttctctacgagccatgtatttgtccctcctttaaattaaaattctaatccgctttctcttgctgcttcagctaatgctttaacacgtccgtgatataaatatcctccacggtcaaatacgatttctttaatgcctttgtcagcagcttttttagcaattgcttcaccgactttagttgctaattcaactttagttgctgtagtagcaatgtcgctgtcttttgaagaagcttgagctaatgttacgcctttattatcatcaataatttgagcgtagatatgcttgtttgaacgatatacgtttaaacgtggcttttcagctgtacctgataagttagtacgaacacgagcatgtctttttaaacgcactttatttttatcaattttactgatcatttcaatactcctttctttagagtttatctattatttaccagttttaccttctttacggcgaacgtattcaccttggtaacgaatacctttacctttgtaaggctctggaggtcttactgaacggatgttagatgctaatgctccaacttgttcttttgaaataccttcaactttaacgactgtgtttttctcaactgagaaagtaatgttttcttcagctttaatttctactgggtgagaataaccaacgttaaggattaagtctttaccttgcatttgagcacggtaacctacaccaacaagttcaagtacttttacgtatccttgagaaacaccttgtaccatattgtttaataaagcacgagttgtaccatggtttgttctatcttctttagaatcagatggtcttacaacttcaattgtgttttcttcttgtttgaatgtcattctttcatttaaagttcttgataattcacctttaggacctttaacagttacatgatttccatcaaaagttactgttacgtcactagggatgtcaataattttcttaccaacacgactcatgttatggcacctccttattttttattaccaaacgtatgcgataatttctccaccaacattacgttttcttgcttctttgtcagtgattacaccttcagaagttgatactaatgcaatacctaaaccatttaatactttaggcatttcgctagcttttgcataaacacgtaaacctggttttgaaatacgttttaatcctgtgataacacgctcatcgttttgaccatattttaagaataaacgaagtacaccttgtttatcatcttctacgtattcaacatttttaatgaaaccttcactctttaagatttcagcaatttcttttttaatatttgatgcaggtaattctaacttctcgtgacgcaccatgtttgcgtttcttacacgagtaagcatatctgcgattggatctgtcattgtcattgattgttgcctcctttcagactcttttttattaccagctagctttacgaacgccagggatttggcctttgtaagctaattcacggaaacaaatacggcataatttaaatttacgatatacagaatgtggacggccacaacgttcacaacgagtgtattcacgaactgcatatttttgttttttttgttgcttagcaaccattgaagttttagccacttaattagcctcctttaaataattatttacggaatggcataccgaagttagctaacaattcacgagcttcttcatcagtgttagcagtcgttacgataacaatatccattcctctaactttacttactttatcatagtcgatttctgggaaaattaattgttctttaacacctaaagtgtagttaccgcgtccgtcaaatgcttttttagaaacaccttggaagtcacgtacacgtggtaatgatactgaaattaatttgtctaagaattcatacattctttcaccgcgaagtgttactttcgcaccgattggcataccttcacgtaaacggaaagtcgcgattgattttttagctttagttactaatggtttttgaccagtgatcaattctaattcttcaacagcattgtctaatactttagaattttgtactgcgtcacctacacccatgttcacaacgattttatctatttttggtacttccattactgaactataattgaattttttcattaagttttcagtaacttcagtgttaaacttttcttttaaacggttcaaagtgggatcctcctttcaacttgttattaattattagatttaatttcttcgccagattttttagcgatacgaacttttttaccatcaacaaatttgtaacctacacgagttggttcgtttgttttagggtccaataattgtacattagaaacatggattgctgcctctgtttctaagattccaccttcaggatttaattgagttggtttttggtgttttttcataatgttaacaccttccacaacgacacggtcttttttaggtagagtagcaattactttaccttctttacctttgtctttacctgcgataactttaacgttgtcaccttttttgatatgcatgtgggcacctccttatttgtattggttgttattaattaaagtacttctggtgctaatgatacgattttcatgaagttaccttcacgtaattcacgagcaacaggtccgaagatacgagtaccacgtgggcctttgtcatcacggatgataacacatgcattttcatcaaatttgatgtatgaaccgtcattacgacgaacacctgacttagtacgtacgattacagctttgacaacgtcaccttttttaacaacgccacctggtgttgcatttttaacagtacatacgataacatcgccgatgtttgctgttttacgaccagatccacctaatactttgattgtaagaacttcacgagcaccagagttgtctgctactttcaagcgtgtttcttgttggatcattagttaaacctcccttatctctaaacttgtattaaataattactgactcttcaacaatctctactaaacgaaaacgttttgttgctgataaaggacgagtttcttgaattttaacaatgtctcctaatttagctgaattgttttcatcatgagttttgtattttttagagtattttactcgtttaccgtataatttgtgtgttttgtaagtttcaacaagtactgtaatagtcttgtccattttgtctgaaacaactttacctacataaactttacgatcgtttctttcgctcacttttgtaacctcctcttacttaattattgattagccttactttgttcaatttctctttcacgagcaacagtttttagacgtgcaatcgtttttcttactgtacgaatacgtgcagtttcttctaattgacctgtagctaactgaaagcgtaggttaaaaagctcttcttttgaagatttgatttgttcttcgatttctgaagtggttaagtctctaatttccttagctttcatttgtttcaccacccaattcctcacgttttacaaacttagtttttactggaagtttgtgacttgctaaacgtagtgcttcacgcgcaacttcttcagaaacgccagcaacttcgaataaaattctacctggtttaacaactgcgatccagccttcaaccgcacctttaccagcacccatacgtacttctaaaggttttttagtatatggtgtatgtgggaagattttaatccaaactttcccgccacgtttcatgtaacgtgtcattgctatacgagcagattcgatttgacgagatgtgatccaagacgttgttgtagcttgtaaaccaaactcaccaaatgttacgtagttaccgcctttagaacgaccagttgttttaggacgatgttgacgacgatattttacacgttttggtagtaacattattattttcctcctccactagtgttcttagtaggaagaacttctccacgataaatccatactttaacgcctaatttaccgtaagtagtgtcagcttcagcgtgtgcataatcgatgtcagcacgtaacgtatgaagtggaacagttccttctgaatattgttcagcacgagcgatgtcagctccgcctaaacgaccagatacttgagttttgatacctttagcaccaagtttcatagctctagtgattgcttgtttttgtacacgacggaatgaagcacggttttctaattgacgtgcgatgttttcagctactaaacgagcgtcaagatcaacttttttgatttcaattacgttgatgtgtacttttttatcagttaacgcatttaatttgttgcgtaatttttcgatttctgaaccgcctttaccaattaccataccaggtttaccagtatgaattgcaatgttgatacggtttgcagcacgttcaatctctacgtgagaaactgatgcttcttttaattcattatcaataaatttacggatttttaaatcttcgtgtaaaagtgaagcgaagtctttttcagcataccatttagcttcccaatcacggataataccaacacgaagtccgattggattaattttttgacccacagtattccctccttaaaagttaattaagcttctttagcttcttctttaccgtcacttacgacgattgtaatgtggcttgtacgtttgttaatcgcacttgcacgaccttgcgcacgtggacggaaacgttttaatgttggtccttcgttagcatatgcttctttaactactaattcatctgtgttcatgtcatagttatgttcagcattagctaaagcggacattaatactttttcaattactggtgatgaagctttgtttgttaattttaaaattgcaatagcttcagcagcatttttacctctgattaagtcaagaactagtcttactttacgaggtgcgattcttattgttctagcaaccgcttttgcttccattaggatgtcctcctctacttaatagatattatcttcttgttttcttgtcgtctgcaacgtgtcctttgaatgtacgagtaggagcaaactcacctaatttatgacctaccatatcttcagttacatatacaggtacgtgtttacgtccgtcgtatactgcaaaagtatgtccgatgaaattagggaaaattgtagaacgacgtgaccatgttttgattacttgtttcttttcgcttccttcttgagcttcaacttttttcattaaatgctcatcgacgaaaggtccttttttaatactacgagccatttgggcgcctcccttcttattatgtgcgtgcagctttaagccgcacacccaaataagttgattatattattttttcttacgtccacgaacgataagtttgtctgatgattttttaccacgacgagttttcttaccaagcgtaggtttaccccatggtgacattggagatggtctaccgataggagcacgaccttcaccaccaccgtgtgggtgatcgttagggttcattacagaaccacgaactgttggacggatacctttccatcttgaacgtccggctttaccaacgttaactaattcgtgttgtaggttaccaacttgaccgattgtagcacggcaagtagataagatcatacgaacttcaccagatcttaatctgattaatacgtatttaccttctttaccaagtacttgagcacttgcaccagctgaacgagcgatttgtccacctttaccaggtttaagctcgatgttgtgtactactgtaccaactggaatgttttgtaatggtaatgcgttaccaactttgatgtcagcttcagcaccactttcaacgatttgacctacttctaatcctttaggagcaatgatatatcgtttttcaccgtctgcatatacaactaaagcgatgtttgctgagcggtttggatcatattgaatagaatcaacttttgcattgataccatctttgttacgtttgaaatcgataacacggtattgacgtttgtgtccaccaccatggtgtcttacagtcaatttaccttggttgttacgtcccgcttttttcggtagcggttttaataatgacttttcaggtgtagttttcgtgatttctgcgaaatctaacgaagtcatattacgacgaccatttgttattggcttatactttttaatagccattgtcgcttacctccttaatggtaattgttttattagttaaataagtcgattgatccttctttaagagttacaatcgcttttcttcttttgtttgtatagccttggtaacggcccatacgttttttcttaggtttgtaattcatgatattaacacttgcaacttttacgttgaagatttcttcaactgccatttttacttgtgttttgttaacacgagtatcaacgtcgaaagtgtatttgtcttcagccattgcttcagaagatttctcagtgattacggggcgcttaagaatatctcttgcttccattatccgagcacctcctcaacttttttagcagcagcttcagtaattactaagctgtcagcattagtgatatctaaaacatttaaaccttgagcagttgtcacttgaacgccagggatgttgcgtgctgataattcaacatttacatcttcgttttcagtaactactaatacttttttaggttgttctaatgtagataatacatttttgaattctttagtttttggagcttcgaagttgaatgcgtcaactacagttaagccattctcttgagctttgaaagataatgctgagcgtaaagctaaacgacgcattttcttaggcattttgtatgcataacttcttggagttggtccgaatacgataccaccgccacgccattgtggagcacggattgtaccttgacgagcacgacctgttcctttttgcttccatggtttacgtccgccaccgcttactgctgaacgattcttaacagcatgcgtaccttgacgtaatgaagcacgttgtaaattaatagcttcgaataaaacgctattatttggctcaataccgaatactgcatcgcttaattcgattgaacctgatttagttccgtctaattttaaaacatcataattagccattatgcatttcctcctttcacttcttattatttattaccttttttaattgaagttctgatttctactaaaccttttttaggtccaggtacgttaccttttactaagataactttgttttctgtgtcaacttgaactacttctaagttttgaacagttacagtgtttccacccatacgtcctggcattttttggcctttaaatactctagaagcatctgaagccatacctacagaacctggtgctctgtggaaatgagaaccgtgtgacataggtccacgagattgtccgtggcgtttaattgcaccttggaaacctttaccttttgatacgcctgttacgtcaataacgtcgccagctacaaaagtatctactgagacttcttgacctacttcgtaagcatccacgtctacattgcggaattcacgaatgaagcgcttaggtgctgcgtcagcttttttagcgtgaccttcagctggtttattagcatatttattagattttgcatcttttttgtatgcttttttgtcttcaaatccaacttggattgcgttgtatccatcaacttctacagttttcttttgtaatacaacattttctttagcttctactactgttacagggattaattcaccgttttctccgaatacttgtgtcatcccaatttttcttcctaagattcctttggtcatcgaaagtccacctcctaaaattgtctattataatttgatttcgatgtctacaccagatggtaagtttaagcccattaaagcgtcaactgtttttggtgttgggtttacaatatcgattaaacgtttgtgtgtacgttgttcgaattgttcacgtgaatctttatacttatgcacggcacggatgattgtgtaaactgatttctcagttggtaacggaattggtccagaaacatctgcaccagaacgtttcgctgtttctacaatcttctctgctgattgatcaattacgcggtgatcataagcttttaatctgattctgattttttgttttgccataattttccctccttattcgtctacatttagtgatagacttctccacgaaaactatcttacacagcgccatggcaaagcggccgggtgtgtcagtaacctttcgcttcatcgcttttcttaaagtccaacgttagttatattacacgaaaaacatcgataaatcaaggcttttcacataatttttctatctgtctaacacatacttttatattttactttatatacttagtcagttcaactattttcgagatattttttatttccttctttattgtaaattcgtaccttgaatcattttattattatcattgaaaattattctatataattagtcataagaacggtggtgaatgaatatgaaaaatggaccaaaattatctttagcacttataggtatctttttaatactttgtgagtttttctatggcattccttttttaggtgcaacgtttattttaagttttggatggcagcctttactctttaatgcattactttatctaattcttactattatattattagtgaatagacaaaatgcgattagacctatagcgattattccaatatttggtatagtaggtagttttttagctattatccccttcttaggaattttgattcattggattttatttttcctaatgattctatttgtcctagttgtattatcagcgccaacctatatacctaataaaaatgctcgtgtcatttacacacaatacaaagatggacatagagaataattcttaaaacctttttaattaggtatataatatagaagaaacacgtccaacaattttaaaagaagtatatttatatcggatatttaaagacattcataatatcgctttatgttatttcgcttcttattttatccttacttcaaagaaaaaaacgactaccaatcattggcagtcgttttttgtgtctggatttaaccatgaacaaatatgaagtacagaatgaatagtaccattaatacatacattatcggatgtacttctttatgttttttagagataagcattgtaattggatagaaaataaatccacacgcaataccagttgcaattgaatatgataaaggcatcataatgattgtaatgaaggctggcactgcaacttcaaaacttttccagtttatctcagcaaagtttgcagccattaatacacctaccaccactaaggctggtgtcgtaactgcacttgttacaacagcgattaacggactaaagaacagcgctaataggaaacaacaacctgttacgatactagcaaatcctgttctagcacctacagcaacacctgaagttgattcgatataagaagttgttgtagttgttccaaaaactgatcctacaatcgtagctaaagaatctgagaacaatgctctaccagctcttggtaatttattatctttcataatacctgcttgagtagcaacagctactaatgtaccagctgtatcaaagaaatcaataaataagaacgttaaaataacaattaagaactgtatcgttaataattgacttgggtctttaaacgcttcaaatgcagcaccgaacgttggttcaatacttggaatcttacccacaataccagatggcatttgaatcaatccagtgaacataccaacgattgctgtgatgatcataccgataaagatagaacccggcaatttaattgcatataaaataactgtaataacgataccgaatatcgccaaaagtactggtggatcagttaaatgtcccaatgttactaatgtagattcatttttaactataatacccgaactttgtaaacctacaaatgtaatgaataatcctatacctgctgaaacagccatcttcatttgataaggaattgcattaataataacttccctaaaccctgtgacggttaatatcgcaaagaatatacctgagaataaaacgcctgttaaaccaacttgccaaggaatacccatggttaacacaacagtaaatgcaaagaatgcatttaatcccatacctggtgctaacgcaattggatatttagctattagccccatgaatagcgagcctacaaatgctgctaatgcagtcgctacaaaaatggcaccttggtccattttcatatcttctgatacgcctttaacacctgctaaacttaaaacttgcgggttaactgctaaaatataggccatagataagaaagttgtgataccgcctaagatttctcttttaaagtttgttccatatttatcgaactggaaatagtttttcacgaatggatgctcctttttttaaaataccttaatagtttaatatcattcttaataaaaaacaataccaaaagcgaacttttcgtttttctgattcaactttgttcgattttatctataaattcaagttctttaatgcatctttaaacggattattgtctaaaccttcatttttattcatatactttttcatttctttacgagatactttaccagaggatttagacttcatacgctgatccatatgtgcttgcgtttcagaatgtccacaaacacaacgatataccgcttctttccctttaccaaacaacgttaatttctttttacagtttggacatcttgcatttgttttgcgctgtacattctttttcgtcttacaagatggatcttggcacacaagcatctgaccatttttagttttaactttaatcatgaatttaccacacgttgggcattctgtggttgttaaattatcgtgtttatatttacgatcactatttttaatcccatttacaacatctttcgtaaaatctttcatttcattaataaatgttttcgcctgatatttaccacgttcaattaaaagtaatttttcttcccattgtgcagttaaaagtggcgacgttaattcttctggtgctaattctaatatttgtttaccttttgacgttactttaattttaccgtctcttgattcaatggcattcatattaaataatttatcgataatgtcggcccttgttgcaactgtgccgataccacctgtttgttttaaagtttgcgcatattttttatccttcaattgaataaagttctgagggttctccatcgcttttaataacgaaccttcattaaaatattctggaggtgttgtttcatgttctctaatatttgtttttgaaatcttcacttcatcgccttctgaaaaaggctgttgcatctctgtaatagattcaccttgtctaatagatttaaaacctaaaacagttgttacattctctttcaaaacaaatgtgtgccctgcaacctctaaagttacagttatcgcgtcatactcgtgcggaggcattaaagcttctaaaaaacgctcgacaatcatatcgtataactttaattctctattacttaagtctgacatgacaggtctcacttctgtaggaataattgcatggtgatcagatactttttgattattaaatatcgacatttttgatgaaaatgttttagacattaatgggcgtgcttggtctttatatgttgttgccatcgtcgcctgaatacgttctttcatagtatctaccatatcagttgttaaatagtttgaatctgttcttggataggttacgactttatgtctctcatataagctttgaagtgtattcaatgtttctttaggtccaattttataacgtctatacatatcttgttgtaaatctgttaaattgtacagtgattgcggatacgacttcttatgtttagtagcaacagatttaatcttaccatcgacatttttcaaattattaaccatctgttctaaagtttctttattggtatatcgctgatttgattctagctgaaaatcaaacccttttaccgttaatgataatgtaaagtattgttgtggtttgaactgattaatctcttgttgtcgtgtatttactaattgaatcgttggtgtctgaacacgtcccagggatagctgtgcatcatactttgttgttagtgcacgggttgcattaatcccaacaatccaatctgcctcacttctcgctaacgctgcataatacaaatcgttatattgacgaccgtcttttaaatttttaaaaccttgttgaatagcttttttagtaactgagctaatccataatcgacggattggctttttgttaccaactttatccaaaatcaatcttgcaactagttcaccttctcgtccagcatctgttgcaataataatatctttcactttattatctaaaattaacgcttttactgttttaaattgtttgcttgttttaccaataacaacagttttcatatatttaggtataattggaaggtcttctaatcgccattcctttaaatttttatcgtattgttcaggtgtcgcatttgtcactagatgacctaacgcccacgtgacaatatattggttattttcaaagtaaccattacgcttctgatttatttgtaaagcatcagcaatatctcttgcgactgatggtttttcagctaatattaaagatttcataaattatcctttctcatacgttcttttatttcgaacgtgcttcatctattccactaatctttgatttaaattcaatgattgcaaatgatgtgttaaatgtattgtaacatgttaatatcactattaactttcatttcagttgaaatactatataataaaagtaacaaaaagtacggaggtaatgacatgagcatagttcagttatatgatattacacaaataaaatcgttcattgaacattcgaattatgaatcagcatcatacttatataaacttcctcaacagtacaatgaaatagatgtattaataaccgatgcgattgaatcacctggtgtattttcgattaaagaaaacgattcaatcaaagcaatcatattgtcttttgcatacgataaaaataaattcaaagtcatagggcctttcgtggctgacaattatgtattatctgtcgatacgtttgaaacgctatttaaagcaatgacttcgaaccaacctgacgatgccgtctttaacttttcttttgaagaaggcattcaacaatacaaaccattaatgaaagttattcaagcaagttataacttcactgactattacatagaagcccgtacaagattagaagaagatatgcaccaaccaaatatcattccttatcacaaagggttttatcgtgctttcagcaaattacacacaactacatttaaatatcaggcacagtcaccacaagatatcattgatagtttagacgaccatcatcatttgtttttatttgttagcgaaggtttacttaaaggttatttataccttgaaattgattcacaacagtcaatcgccgagattaaatacttcagttctcatgtagattaccgtttgaaaggtatcgctttcgagttgcttgcgtatgcattgcaatatgcttttgataattttgatattagaaaagtttattttaaaattcgtaataaaaataataaactcatcgaacgatttaatggtctaggtttccatatcaactatgagtacattaaattcaaattcgaatcacgtaacgtaaaagatcaaacaatccctgaataaaacaccaagcaaataccctacagtacatcattagcatgtattgtgggtttttctactttttgtaaatattgaaaattataagtagttgttttttactattagggcagaatgctttacaataacatgcaagtgtcaattaaggggagcacttgcataaatagtataggagagtgagtagtcttgcaatttcttgatttcttaatcgcacttttacctgctttattctggggaagtgtcgttcttattaatgtgttcgtcggcggtggaccttacaaccaaattcgtggtacgacgctaggcgcactcattgttggattaggtttacttattactggtttcgcaaaattcaataatcctactgtaattattgtcggtcttatttctggtgcattatgggcgtttggacaagcgaatcagcttaaatctattagtttaatcggtgtatcaaatactatgccagtttctacaggtatgcaattagttggtacaacattattcagcgttatctttttaggtgaatggtcttcaatgactcaaattatctttggtttaatcgccatgatattattagttactggtgtagcacttacttcacttaaagctaaaaatgaacgtcaatcagataatcctgaatttaaaaaagcaatgggtattttaattgtatctacagttggatatgtaggtttcgttgtacttggtgacatctttggtgttggtggaactgatgcattgttcttccaatctgtcggtatggcaattggtggctttatcctatccatgaatcataaaacatcacttaaatcaacagcacttaatctattgccaggtgtgatttggggaattggtaacttgttcatgttctattctcaaccaaaagttggtgtagctacaagtttctcattatcacagttacttgttatcgtttcaaccttaggcggtattttcattttaggagaaagaaaagatcgtcgtcagatgacgggtatttgggcaggtattattattatcgtgatagctgctataattctaggtaatttgaaatagaaagttaaatactcatgtaacgtaaaaatgtaatcacttctgaaaataaccattcacttatagaatgattaaaattaattttcgggaattttacgttgaatgttcctctatatgtcctaggaaatacgtggctctaaaaacaaaacgcaataacacatcatgacattaatcatgcgttttaagactttaaaattagcgatacttttaaaatcttgatgatattcatatatcaagtatgcgccatacatatgaagtggatagctgcataacgcactgcattatcaacttgaatgtatgagttgaacaactatgtcataaataaaagcccccttttcacaatatacatttacatattgtggtaaagggggctctcattttctacgaatactaaaatggattttattttcaaatgtgtaaactagacaaacactgcctgatacacgtacaaaataatgatactaataatgattgtcaaattggtcgtcatacctataaatgtcagtgttcgatatttaaactgaataccataagaaataattgcaacacctaccgggaacatccaagtgaccaacaatgtcgtcttaatcatatcatctgatactggtaacaacacatatactaacaatcccgcaactaatgctaatccataatgcaaacataaatatttaatagtagcaggtatatactttctttccagagtaaaattcaacatgacacctagcaaaatcattgataacggcatatttgcatgggaaagtatgctaaagaaatcgattgccacatgtggtaaatggatgtgacttatattcaatataaacattacaatgtatgtaacgagtggcactgattgtaataatttcttacctaaatatttaaaatcgaattgatcactaccttcactaaagtagctacctacaaagtaagtaattccaaacatcacaaaggcaccacctatatcagccataacaaaataaataagtcccgttttaggccatatcacttcaattagtggatatgcaaacaatccaatattcatagcaccagtcatcatacctactgatccacgcatgtgattatcatattttctaaaaaaccagacagcaatcattttcgccacaataccatatataatcattaaaattggtaaaatggagaatgacaattttaattctgcactgtttaaattcacaataactaaagatgggagtgtgacattaagaactaatgtagcaatgacttgactatctgttgcttttataaaattaatgcgcttcaaaaagtaaccaagcgcaattaataaaataatcatagtaaattgttctgtcactgttatcccttctttcaataatcttcataatttataactttaacatactccacagatattttagaagtctactgtttcatgctataatctacattaaatgcacttaattatatttcaaaggagtgttatagtatgtctttagaaaaccaactagccgaacttaaatatgattatgttcgtcttcaaggtgacatagaaaaacgggaatctttgaatttagatacttccgcacttgttcgtcaacttaaagatattgaaaatgaaattagaaacgttcgtgctcaaatgcaagattaataatctatcattcaagcaataaatgctttttgttacataaatttgactagcattgctctgaatacgttatattgatgaattgcttcatttttcgctcaattacatctagaatcacaagatgttgtcgtgttatgatttagtgtttcattaacaacatacacgcatatctatcccaacactgctatttatgttttctacgctgctgtactacatgaaccctttgaaacggagaggaagttatcatatgcaattttatctgattttactagcaatactttatctaattgttagttttattagtatttttaaaatggaagttgtatttactcgcattttgagaattattatgggtgtgttgttattattcgtcttagcattaacgacgatgagttttccaaaagagaattggtgggtatttatcgtcttattactcttagtcggtaatgtcgaagtgacaggatttaaaatgcttaaaaaagatctaaaaggcgtaaacatcttgaatttaatgtcattatttatctttgtcatatatttcatcttaaccatcgtattattctaagtaataaacaaaatatgcaataacataattgcaaccttattttattatcggattacatgttgaatgccagtattgttttattaacacatcgattaaatcgcacgtgaaataaggtctaaaatttcaaattttaaaaagccataaaagtagtcaatatcatgaccgcttttatggcttttatattatctatcgtttagtgaatcgtttttttaaagtaaagagaatttcatatattactggtacaactacaagtgttaataaagttgatgaaattaaaccaccaataactgtagcagctaatcctttcgaaataagaatcgagctatcttgaccaaataacaaaggaactaatgcaccaattgttgcaatcgccgtcattaatatcggtctaattctagtaccgcctgcttcgattaatgcttctttcatctccatgccctgttgctcattattaataacacggtctattaacacaatggcatttgttactacgattccaattaacattagcataccaattaaacttggtactgatattgtttctcctgtgattaatagtgcaataattacaccgataactgtaaatggtaaagagaataaaattgtaaatggtgctaggccacctttaaatgtaataactaggattaaatatacgataatgattgcagctaacattgcaaaggctaattgtgtcattgcattgttaatatcatctgatgcaccaccgatattaacctttacattattcggtttgtccaaattatttattttagacatcacttgtcgtgttgtgccacccacatctttatttgttactttagcagataccgtcgttgcataatctccttgttcttgcgtcaatttacttggtgtcgttgttttaactaacgtagcgatatctcccaatttaatcgtaccaccagtcggctttttcaaagttatattattcaacttatcttctgaccagtctgtttgcttattttgtttgactttaacatcaaccgttttaccattttctttaacagtcgtaactgttttttctggtaagttttcattcaagtgcattgcaagttgacttgcagaaataccattttctgccgctttattttgatcgactttaatttcatactgatcatatgtttgcgataaatcagatttgacattggctagtcctttaacctgtttcattttctgttcaatatcttttacagttgattttatggcatccattgatggaccttttacagtaacctctacagatttattacctgcacctgttcctaaatcttgatttttccactctccaggatgtttaaagccatctgcatgtttaataaccttatccgcttctacatcaaaattaggcgtgtcattatcatattcaaccatgattgccatactatttgtactacccgttggatctactggactactaccgccaactgagtattgaattgtttttacatgctttttctgttttaaatatttttcaacatctttcgcatgattcaacactgcttgctccgtttcaccaggcttcggtgtataagtaatagctaaaaatttatcgtcacctgctgaaataaagctagtgcctagtctcggtcctccaaatacaatagttgcaaccaaaattaatgtacttaatataattacaatccacttatgatttaatgaccaatgtaatacttttttataagttgtactaacaacacctaatccttcttgatgttgtttattacgacgtttaacgccttttttaaatagtgtagctgccaacgctggaacgagtgtaattgacactaataacgatgctaataaactaaatgcaatagccaatgcaaaaggtctaaacatttcgcctactgaacctgatacaaacacaagtggtaagaagacgataatagtaactagtgtcgatgacattattggtttaaatacttcagttgtcgcactgataattaaattttcaccttttagttgttcttctgaatctgttaagcgtcgataaatattttcaacaactacaatcgaatcgtctatcacacgtccaatcgctactgttaatgcacctaacgttagtatattcaatgaaacatcactcaatttcagagcaataagcgccataagaagtgataacggaatcgatataatagaaattgccgtcgtacgaatgtttcttaaaaacagcaaaataactataattgccacgattgtacctaatgatgctttttcaaccatcgtataaagtgatttctcaacaggctttgcagtatccattgtttttgtgacattaaaatctttattttcatcaacgaatgtatcaattttacgttgtacatctttggctacttgaactgtattggcatcttgagctttagttatttgtagattaaccgcatcctttccattcgttttagaaatagaagtacgcacatcaccaactgtaatatcagctaaatctcctagtttcgctgtcggcataccacttatattatttggtgctgacgcttttgaattttgctgtggtgatgcctgattaacgtctgacatggctgaattttgtttattgtcactttgggattgagattgcccttgtcctcctgccaacgttaatggaatatttatgtttttaaaagcatcaacagattgatattgaccatcaacaacaattgatttatctttatcaccaaattggaacaatccaagtggcgttgttcttgttgccgtttttagatagttttctacatcatcagcagtcaacccatatttttcaagttcattttgcttaaatttaagggtgatttcacggttcgtctgcccatttaattgcgcattttgcacaccatctaccgtttgcaattttggtattaattgttcattcagtactttcgttacttttttcaagtcattctctttatttgaaaatgaatatgctaaaaccggaaaagcatccatcgaattacgtcttaattctggttgaccaacttcatctttaaatttaattttatcgatttcttttttaagctgttcttctgctttatccatatctgtattattttcatattcaactgttacaattgaagcattttgtatggattgcgttttaacatttttcacatatgccaatgatcttacttgattgtcaattttactacttatttcatcttgggtactttgtggcgttgcacccggcattgttgttgtaactgaaataactggattttgtacatttggtagtaattctaatttcaatttagcactcgcatatacaccgcccaagacaactaaaacaaccattaaaaagatagcaaacttattccctaaagaaaattgtaatagcttttttatcacagtacttccccctctttcactatattcaaaaatattttactcaaccattctatattgtgtaaaaaaatctgaacgcaaatgacagtcttatgagcgttcagatttcagtcgttaatctattttcgttttaatttacgagatattttaattttagcttttgttaaacgcggtttaacttgctcaattaattggtacaatggctgattcaatacataatcaaattcaccaatcttttcacttaagtatgttccccacacttttttaaatgcccataatccataatgttctgagtctttatctggatcattatctgtaccaccgaaatcgtaagttgttgcaccatgttcacgtgcatacttcatcatcgtatactgcatatgatgatttggtaaaaaatctctaaattcattagaagacgcaccatataagtaatatgattttgagccagcaaacattaatagtgcaccagaaagataaataccttcaggatgttccttttctaaagcttctaggtctcgttttaaatcttcatttttagcaattttattttgcgcatcattaatcatattttgcgcttttttagcttgcttttcagatgttttcatcttctgctgccatttagcaatttcggcatgaagttcattcaattcttgatttactttcgctatattttcttttggatccaactttactaaaaatagttcagcatctccatcttcatgcaacgcatcataaatattttcaaagtaactaatatcacgcgttaagaagccatcgcgttccccagtgattttcattaactcagcaaatgtttttaaaccttctctatcagatcgttctactgtcgtacctcgctttaaagccaagcgcacttttgaacgatttcggcgttcaaaactatttaataactcatcatcatttttatcaattggtgtaatcatagtcatacgtggttggatgtagtcttttgataaaccttctttaaatcctttatgtttaaaaccaagcgctttcaaattttgcaaagcatctgtacctttatcaacttcaacatcaggatcgattttaattgcatacgctttctcagctttagcaatttcttttgcactgtctaacaatgcatttaacgcttctttattactataatcaacaacaaaaccacgcgaaatataacatagcgtataaggtaatttaggtacttttttaaaaagtaactgcgcaacaccctgaacttcaccgtcacgacctacagcgattcttcgcgcgtaccatccagttaatttctttgtttctgcccatttcgttaattgtaataaatctccatttgggtgggatttaacaaatgcgtcatgttcctgattagtgatatgcatcttttccatgatttatgatatctccttctatttaacaatacctttaattatacagtttgtatcttatagtgtcgattcagagcttgtgtaagatttgaactcttatttttgaaatgtccatgctccaattaatagtttagcaagttcaaatttacccattttaattgtgaatcattttatatctatgtttcgtgttaaatttaatgttatcgtacaattaatacttttcaactagttacctatacttcaatatactttcatcatctaacacgatattcatttctaaaatgaaccaacttgacttcaatgaataaatttttcctcaagcaaccacattaatgttcatatacaattacccctgttataatgtcaataatctaacaatgaggtgtttgatatgagaacaattattttaagtctatttataattatgaacatcgttgcaatcattatgacattgagtcaacctctcaccgtgaattactttagtttacgggttatacttatctttttcacatttatattatcaatctttttcattttaattaagtcatcacgattaaataatatattaacgattctttccattgtgcttgtcattattcatatgggcattctcgctcatagcacttacgtatatttatactaatggttcaaagcgataaatagcacctctgataaaaattgaatatggtgaagttgcttgtgcgtcttttatgataaccgaatgatattttgaaactttaccatcttcaattctaaaataaatatcatcattttttaaaatcaaatctgtgtaatggtcattctcttctacaatgtccatatcaaaccatttcaaccaattcgatactgtttgtgatcggtttttacttttcacaataacagtttcaattgaaaattgtttttgaaaatatttttgcaattttttagtacgcatggaatcactttcttcccattgaataaaaaatggtggcttaatttcatcatcatcctgattcattatataaagcaattgccactttaccttaccatctttatgtgtatctctttccatttgaatcggccctactacttcaacctgctcactttgtagtttatttttaactgcctctatatcatttgtacgcaaacaaatatttttaaagccttgctcatacttctcttgaacaatttgagtagcaaaagcgactccgccttctatcgtttttgccatctttttcaacttttcattattttctacatctagtagctcaatataattttcattgatataacctaatttattgaatgttccatatttatgatgatacccacctgaatgtaattttataacatctcctggaaaactaaaccgatctaactgatctatataatgaatgatgtgatcaaatttcaatatcattagtatccccctatttacatgtaattacgcttattttaacaaagtataattatttttgctcttaataattatatattgatttctaattgctcccgttttataattactattgttgtaaaaaggttagctaagctaactattttgtcttaggagatgtcactatgctatcacaagaatttttcaatagttttataacaatatatcgcccctatttaaaattagccgagccgattttagaaaaacacaatatatattatggccaatggttaatcttacgcgatatcgctaaacatcagcccactactctcattgaaatttcacatagacgtgcaattgaaaagcctactgcaagaaaaactttaaaagctctaatagaaaatgaccttataacagtagaaaacagtttagaggataaacgacaaaagtttttaactttaacacctaaagggcatgaattatatgagattgtttgtcttgatgtacaaaagctccaacaagcagtagttgccaaaacaaacatttcgcaagatcaaatgcaagaaaccataaatgtgatgaatcaaattcatgaaatattattaaaggaggcacacaatgactaatcaaggctcattaaataaatcacctattttcaccaaaagttttacaattaactttttagtcaactttatcgtatacctatgcatgtatttgttacttgtagttattgctggctatagtaagcaagctttcgacgcttccgattcattagccggattagttgtaggactatttattgtcgggtctttaattggtcgatttgctacaggtaaatttgtaaatcaaatcggacctaaacgattattatttattggtttaattgctttaattatcacgcaattactttattttattgatggatctttagcttttttaatctttgtacgtctcataaacggtatcgcaactgcagttgtgacaactgcaacaggtactattgcggcatacgttacccctgttaatagaaaaagtgaaggcatcagtttattttccttaagtttagtattaggtacagcgattggcccatttctaggcatgttacttattacaaaatacgcaattgacttactgtttattatttgtgtcatattaggcatactcggactcattatctcattatttataaaagttgatttcgaagtaacaaataacaaaactgaaactaatgtcattgataaaccaagatttagtattcatcaatttattgcaaaagaggccattcctgttgctgtaattatgcttttaattggcgttacctatgcgtccatcctaacttatttacaagcatttgctttagagcgacacctagtcactgcagcaagctatttctttatttgctatgctatagcatcgttaattactagacctattgctggtagattgatggatgataaaaatgaaaatattattgtctacccagcatttatcatgcttttcctttcatttgtatgcttaatttcaagctatcaaagctggttaatattacttgctggtgcttgcctaggtttagggtatggaaatttatcatctgcaatgcaatctattgcgataaaagtctcacccccgattaaatatggtatcgcgacatctactttttacgttggtctagatgcaggtgtcggcttcggtccatcattccttgggttatttactcatatgttttcatatagtgaaatcttcggctttatggccgctttagcaatcattactatgcttgtttacttcttaattcatggacgtcatgtaactagaaatgccatgaactaaatatttatattcaaaaataaaaagcatgccaatctctattcatcatttgtctgtccccaagacgcaattatgatgtactgattggcatgctttttaagtttttagtttgtaacgcttaacacttctatttctttagtaattttatctaacaatttcttttgagaagtactatagaaatagaatacttgtctttcatccgtttcagaacgcaatttagaaataagctcttttttatagattttacggataatcacatcgattttacttgtatcccatagcatttcaaaatgtaatgtatccctcaattctttaccgctaatcttttcagcttcatacactttaaaaaggactacaaattcttcaattgaaatcttatgtgttgtttttaaccagtgctttaactgacttaactccctttctgcttctataaaacgttgaactttattactcataatatgatgcctcctatgtttcttcttagatgtttgtaattcatattattatacaattacttaaatttattatatatcaaacttagtattttatctattacaaatattaaattgctggctatatcttgtttagatttatatcttttggacaacttgttgtttattcgacaacatttatacctaaaaaagatatattacaactcaatggcatggagtgtgacatcaatgttaaagaaccactaaagatttattatgtagtgattcttaagagtgggatagaaatgatattctcataaaatttatttcgttgatccccaacttgcattgtctgtagaatttcttttgaaattctctatgttggggccccgccaacttgcacattattgtatgctgacttttcgtcaccttctgtgttggggccccgccaacttgcattgtctgtagaatttctttttgaaattctctatgttggggccccgccaacttgcacattattgtaagctgactttctgtcagcttctgtgttggggccccgccaacttgtaaaaactttaaaaacgatcatttctattaaatctggcatagatatgaccgtttttactttaataaataatattgtattttagggagtaagacagaaatattaaaacatctctaatgatttaatatgtagtggtccctacacattaaccaccaatataattcatgtttatctttttacgttgacgattggcaactgtttgagcagttctctcatctgaatatcgatcatctcttatttgccataaagctttaaattgttcttttaattcttcgtcggtcacgccagaacgaataaacgctttaacgttaaatccatcgacagttgcaaataaacatccgtaaaacttcccatctgatgacagccttgcgcgtgtacatgtagaacaaaatgattgtgaaacacttgtaatcaaaccaaattgaacaccattatccttatggcgataatattttgctacttccccaaaatattttggttctacaggatcgatttcaaagtgctgctctatcattgtaagcatttcatctttagttacaactttactgaaatcccatccattatcattaccaacatccataaattctataaatcgaatctctatatgtttatctttaaaatattcaagcattggtatgatttgatcatcgttaatacctttttgtataacaacatttacttttacattcaaaccaatagacgtcgcgtaatcaatttgttctaaaatcgtagtcgctttaatattacgattattgattgattgaaatagcgtatcatcaatagcatccaaactgacattaattctgcgcagcccagcatcatataacttttgtccatgcttttttaataacaaaccatttgtagtcaaaccaatatcttcaataccatcgatttgatttaatttagctataagtacatctaaatcccgtcgcatcaatggttctccacctgtaatgcgtattttttttacacctaattctgcatataccttagcgattctagccatttcatcaaacgttaaaagttcatttttaggtaaaaatacgaaatcatctccaaatacctctttaggcatgcaataatcacacctaaagttacaccgatctgtcacagataaccgtaagtcacggatgggacgtcctagtttatcttttatttgttctaccatttgtggacctcctaacagcttacaatttttgaattaaagcgtccaaatcatgctgataatttatatttttgtaccaatatgagggcgcatctacatcccttacatccaaataatccgttgataattcatgatatacatttttaaaactgtaattatcagaatgtagtgctttagttatagcgcctaatgcattcggactataaaatgcaattgttggaataaaacgtccatcttctttaaaagctgcgacatctaaatgattttcaataagatgagaaactaaaaactgatacaacgtgcttacagctttaccagtaatcattggtgtatcaacagaaacgacaaaaaacaattcttcttcaggatgttgcttcatgattgtataaattcctgctaatggacctttatcattatgattctcatcatctataacaacatttggatatttaaattgcgttgccaattgcgcatttgtactaataataatttcattgaacatatttgttgattctaatgtcttaattactctactataaaaggtctcaccgttcacttccgcaaaagctttgggcttaccaaatcgcactgaatgaccacctgcaagaattattgctttcatgctcccttaacctccactaaccggtggaattaatgcaacagtatcattaggttgaatgaaatccgatttttgtacaaattcctcatttacagcaacttgaaactttttattattgatttgcggataacgttcaaacaataaatcttcaaattgttgtacagtcaatgcttgttcaagcacaatatcttcctgtgctttttgtaatatatctttaatttctgcgaagtaaagtaccttcatctctcttattcctccctcttcgcttcttcataattccctttttgatgcccttgccattttgaaccatcttcccaaatttcttttttccaaatcggaacaatttcttttatacgctcaattgcatattcatttgctcgataggcatctttacgatgcggtgaagaaaccgcaattaatacagcgatatctgaaatttgtaatgtccctattctatgaacaatactcgttatcgttccaggccatttttcatttatttcatctccaatttgtgccaatttcttttcagccattggaatatacgcttcatattctaaatattccgttttgacgcctttagtccattcgcgaacatgaccggtaaaaacaactactgcaccttgatattcatttatagtgaattcacgatattgttctgtttgtatcggttctgtcacgatttcaaattgtttcattcatttcaatcctctatgttaattgtgtatcacaatcatttttaattttatttaataaccattgctcaaatgctgtaaaatcttcatgctcccttacattaatgctataacaaacattcgacaattgttgtaatacttgcaactcttcttcatttcgatagactacgactttttcaaaatcagcatttttaaagccttcaactaatacgatattggtgtcaattgtaacagatttttcaataatttgagtaagattttgattatctacacgtgttacagtttgctgatattgaaaaccttgtacaatactttgatctgcccccgcttcaaaatgcttcatgtgatcgacgtctgaatcctgtaattgaatatcttccttaccatgcccatgatgtttaatagtagcaactgtataaccatgtgactttaagaaagagacaatatgcctcatcaatgttgtcttaccagactttttgtaacctacaatttgtaaaatcataaaagaagttcctcttcagcagcgtcagattcagtcaatataatatctactgtatgccccgctttaaaaccacgtgaccctcctggtaacatgaccatacagttagcatgtgcaatcgctacaaccgcacctgatttattgaatcctgaaggtactacagtagctccagcacttgttaacgttgctttagcacgtataaatcgtgtgaatgggtttgccttggtaaaatcttccattaatgttgctttaattatttgcgggaagacttctagtgcgccacacatatgtttaacagctggtttcacaaatagttcaaatcctgtaaaacaagctgatggatttccagataatccaaacaaatactttccatctacaaatgcaaccgttgttacgctaccaggacgcattgctactttattaaataacacttccgcctttacagccttataaatctcaggtaaatagtcaaaatctccaacagaaactccgcccgttgtaataacgatatcatgtttttccatagcttctttaacgacttggatgccactatctaaatcatctttttgtgttttgtaaataccaacttcaagacctaatttttctgctaaggcacgaatcattgggccattagagttacgaatttttccatcttctaatacatcattaacatctaataattcgcttcctgttgcaataacagcgacactcggttgcttaataactttaacctctgcatagccatatgttgcaaggaccgcgatagcccctggattaattacttgtcctttttttagaacaacatcgcctgtctttgtttcttcaccttttaaagatatattttcattttttgaaaatggtttacgaattgtaaatgtatcttctagttcaatcgtttgttcaaacataacaacagcatctgcgccattaggtatttgtgctccagtcataatacgcaccgcttcgtgatccccaactaatttatcagaaactgaacctgcaccaatatgatcaatcactttaaactcaatgcgattctgaccacttgccccttgtgaatcaacactgcgaattgcaaaaccatcataaggtgatttatcaaaccttggtatatcataagtagctacaatatcttctgctaagatatgatttagacttttttcaagtgctaccgtaattgccggcattgaactctgctgattaacgatacgttgaattgcttctttaactgggattgggtttcttttttctactaccattaaaaatcatctccaaaacttttattttttcatgatatactagatgcactaggaggggtaaaatgactgagtttactcatattaatcaacaaggccacgccaaaatggtcgatgtatcagacaaacaaattacaaaaagaactgctgtcgctcattcaagcattactgtaaatgaaactatttttaagcagatttctaataacaccaataccaaaggcaatgtattgaacactgctcaaatcgctggtattatggctgccaaaaatacatcaacacttattccgatgtgccatccattaccattgactggcatagatgttcacttcagctgggatgaaacaaatgcacccctttatactttaaacattcaaacaactgtctctacaactggcaaaaccggtgttgaaatggaagctttaaccgctgcatcagcaacggctttaaccatttacgacatgacgaaagcagttgataaaggtatgattattggcgaaacctaccttgaaagcaagtctggcggtaaatctggagattttcaacgccaatcaaatcaataaattattttgtaagctcatgaatcagatgatttaattctggtttaatgagcttttctaatgctaatttaactgcgcctgttgatcctggaatcgaaaatatcaatttattattaactgtacctgctacagcacgagacaataatgcacgcgtgccaacatcttcaacataactcaaatatctaaacaattccccaaagccatctatctctttagttaaaagtggttttactgcttcaatcgtcacatcacgttgtgcaatacctgttccaccagtcgtaatgatgacatcaatatcttcttctaaccacttcttcacctgcgtcgtgatggctactttttcatctttcacaattgtataatgtgcgtcactcacttcaacgtcatctgcttgtaatagttggcgcacgcattgaccacctttatctgtatcaaagtctctagtatctgataccgttagtacggctgctttaactgtacgattcaatttaacgttttgatgttcgcccataatattacactccttttgtcttatctttttttatccaaacaataaattcattagatgtgtggcatctgatgtgcgtgtcatgccatgtattaaaaaccttccacctttaaaagcaacaatgcggtgtcctttaaattcaaacataaccatatacgaattactgcgataatttaactgatgttgttttaaaaattgaacaagaatgtcgtgtgtaattgatgcattttcatactgtacagtgtctctaccacacaatgttgcataacgttgttcattcttgtttaaatacggataacttggtacatctccacaagttgtacagtctgaacgttgcattttactgaaaccaaatgaataatgactaccttcccaaatatcgccataagttatttttgtgtcaattggttgttccgttaatactttcatcgcatctcttaattgtaaacttgttgccatcgtcacggcaggttgaatgacccctactgtatcacatgttaaatttaatgctggcaattgtggtaccaaacagttaaagcaaggtgttttaccaggtataaatgcagcttctgtatatgtactctgtacaacaccaccataaatccaaggtatacgatatttatatgcaaaatcattaatcagttgtcgtgtttcaaagttatcggttgcatcaataataacgtcaacgtcctgtccatgtgtttccaaaaaataataatccacatgggcaatataatcatcaatatcaacatcactacgtaacgctagcaaatgctttttagctgcaaccaccttaggcatcattttcaaagcatcttcttcagtaaacaatgtttgtctttgtaaattactaaattcaatataatctctatcaacaatgattagtttggcaatgcctgctctaacaagtccttcggccacatgtgtacctaatgcgcccataccaataatcaacgcacatttttgatttattttgctttgacctatttcacctatttgtttaaataaaatttgccttgaataacgttcttgactcacattaagttatcctttctttttatcattactttcattatatgacgcgcgtcaatgtctctcaaaaaaactgcccctaaaaaagagtttaaaacatcattaaaatgctgatagaagcattcacttctacaattttaaatacgttctaaactctttaatggcaaataaatgattacccaattgtaataatttcatgagccatttgttctgcttcatagtttgaatgtgtcacaaatatgattggtatttgccattcgttgaaaatacgtttaactaatgtaatactctcatcttttgtagtatcatccaaactagaaaaaggttcatctaataaaattaaatctggtttcgtgctaagtgcacgtgcaagtgctacacgttgtgcctctccacctgacaatgtcataggatattgtttcatcaaatgatcaatgtttaaagtttgaattaattgatcgatgtgttcagatggttcagccataaaagtaatatttttatagaccgtcatattaggaaacaattggtagtcttgaaacagatatccaatacgtcgttgttgaattttaacattcacgttttttgccgtatcagtaagtaattgcccattcacttcgataatagcttcatctgctttacgtaatccggcaatcatatttaaaacagtagttttaccaatgccagatggaccacgaactgcataaatttttggttcagtatcatctatattgatgcgaattaaagtgttctttaattgatatttcacattgattttaagcatctagtcgacctccttatatttatctttattcaataaattaattgtagatataaccacaatagagaatgcgactagcactaatacccataaccacgcttcattttctctaccttgttccactaagaagtatatttctaaaggtagtgtattcgttttatttggaatatatcctgcaaccattaatgtagcaccaaactcacctaatgcacgagcaaaactcatcattatacctgctaaaatagagcgtttagctaatggtaaaattaatttgaggaaaattttcgtttcacttgctcccatcgttctagctgtattaatcattttcgtgtctatacctctgaagccttgcacagtatgttgatacattagtggaaaactaacaatgacagatgctatcacagcacctgtcaaagtgaacactacaggtaaatgtagtacattcgcaaagaattgaccgattggtcctcttggcgagaagatgattaatagaataaaacctaataccgttggcggcaaaacaataggtaatatcaataaactttccaataatttaacccacgaacccttacgacgatacaaccatttagatataaaaatacctaaaaccgttacaataatcgtactgattacagcaactcgtattgatatccaaaaaggtgttaagtcaggcatggattacaactccttatgctgcaaagtggtattcttttagtatttctttagctttatctgattttaagaattccatccactcttttgctaatttactatctgatgtagcaccagcttcgtatgtgattggcttcttaagttctacttctttaattacttttacagtatcaatttttttattttgtttatataagtcagttttatacacaaaaccttgtttcgcattacccttttcaacataatttaatacttgttttacatctttagcataaacgattttactttcgacttctttaaataagttattgttatctaaatactgtttcgcatattttcctgctggtacagttttcacttcacctaatgctaatttatcattgtcttttaagtcttttactgaagtgtaatttgaatctttatcaccaattaatactagactatttttcgcatatttatatgtatcatgcgctttattcttgtcttttaatgcatctacatctttagtatttgcagacataaatacgtcaacaggtgcgcctgattcaatttgttttcttaatgcccctgatccaccatagttaaatttaatatcagcatttttatgctcttttttaaattctgaagctaatttcttggttacatctgttaaacttgctgccgctgcaacttgaatctcttgtttcttaccattgtctgcgtcatcttttttactttcattattatcgttagaattagagcaaccagctaatactaaaagcattgcaatcacaacagcaaataaacgtttcaatttcattgagtgaacccccatttttaataatatttacattttcattatacacttactattatatttgaaaagaaccgttgcctgtttatatattgattcaaacaattgtcaaatttgcataagattgatatttattaattgatgccctagtatgtatattctcgaattcaatttaaatcaaacagattgctcgctattaatttttatcaatcaaatttcaaacttaagcaaatatgttaaaattttaagcaaattgctttaaaataaagtttaagctaattaaaggggttagataatgaacaaagatgtatctttaggtcaaccaattgttagatatgaagatggaaaattattcaatacaacagatcaatatgtgacagaatttccacttacaattatggtgaatggtgaagaatttgcgactgttatatgcagtccaacaaaccttgaggagttagtcattggatttctggcttcggaaggtgccattttaaagcgagatgaattaaaatctgtactgattgatgatagtaaaggttttgcccatgttgaacttaataaagatttaggcgatcgctttcaatattccacaaaacgaatgattgcatcttgttgcggaaagagtcgtgagttttattttcaaaatgatgctgctatcgctaaaacatctatgtctaaaatcactttaactccaatgcaaattattaacatgatgactcgattacaaagtgcaagtcatatttaccaagaaacaggtggcttacataatgctgctataagcgatggtttgacattttttgtacatcgacaagacattggtagacataacgctctagataaattatatggattttgtattcagcgacatattactgtccgagataaagtattaatttttagtggacgtatttcatcagaaattttaattaaagccgcaaaaattggtgttggcgtcattttatctaaatcagctccgacaacgcttgctgtaaccttagctaatgacctaaatattacggcagttggatttattcgaaatggtggctttaatatatacagtcatccagaacgtatcattgattctgaacaataacatattcattatagtgtgtcataatgaacgatattctacatgaatcaacaatttaaacgcactatttttataagtataagtagctcaaaacaatttaaaaagcagtaagttgatttctactcgaaaccagcttactgcttttttattctaatacaaacctatcatcaatcgttaatttccaatatcttcttttaatatttgataacaaaacgattgatagacataaccttgctttgcatacatatcttttgctgtatcttcaccatctgcaactaatatgattggtttgtgattttttgatatggcgtattcacctatcaacgattgaattgtagatccaattccttggtgccgaaattgttctaatacaccaaatccatctaattcaatgtaattttcactttcaatgacatctacaacgccaataggttcattatttaaataagctactaagcgtttaatcacatctttttgataatgttcccttaccatttcttcatgtgcatctgcatagtcttttccaaatggcaaactaaactgatatgcaacttttaaataggcatctatatgcgactcgtcaacgatggcaatttcaacgtcagagttacgcggcaaattggcaagcgcatcactttctatggcatacaattccataatacctagttcaaaattcatatctttaaacatagccatccaatgattatcaagttgttcattttccgggaaactaaacgcataatgatttgaaccttgatttgtatgtaattgatgttgacgttctaagtctttcagccatcgctcttgggtaggcgtctttttatatatccatgtgttacttgtgtatcgttgtggaaaagaaggcgttaaataaatcaactgctcgtcgtcattttcaaatatagtgccgttacaatatatatctgacatacttatactagccattgacacctactcctttcacttttataaatttcaaagcaacttattcaattactttactatcttaaatatgattattttattcccataatttgacgaaactgcgagtgattaagtaaagctgtaccaatcaaacttgctacaattgcttttaatatatcaccaggcaaataagctaatgaaattgaaatagctttcgtaaatggtatgttaataatcatgcccataatcaatgtaccaataacatctaatgctataacaccaaaaactaaaataccaacgaataaaatccagaaattaatttcattgatgaatctatctcgaatcgccccaatcatgaatgctacaactggatataatagtaaaaaccctgctgaaggacctgcgaatacaccgatgccaccgcgaccacctgataacaatggcaagccagcaactactaataataaaaagacgataacacttaatgtgccatatttacgtcctaaaatcacacctgctaagaaaataccaatgttttgaagtacaattggtactgaagaaaatggtagtggaattaccggtaccaatcctaaaatagcgataatcgctgtcattaaagctgtatatactaactgttttgttgtcattttttacttcctttcgtatttcatgaccattattatagcaccattgtaaactttaagaaatgaaaagtttacaataagttgttctatataaattaaaaccttaattattctacacagctgttaatttacttttttagcaagtgcagttatataatcaaaaaatgcgttgttatctacatgatttatgacattaattttgcgcccatctttacactcaaatgtcttaccttgacttggtccataacttattacatcgacttttttctcaattgaatgaaccaagtccttgttaccaatataagcagtcgttaaaacatcccataaaaagtaagtagaatttgttataaagtgtgttaatggtggtaccgctgcataacttactcctaaaaaatcaatgcccgtatattggcgttcattcgcccatctttgtctaacatctaacgttagcggtacttgattcgtactttctaaagcaaccatatcaatctctatatcgctatcaaaaacaattttaaccgcttctggatcccaatatgcattccattctgcagaaccatcatgctcaggttcttcaacatttccttttggtaaaaaggtgccacccatccaaactaatttttctatatactgaacgatagatgaatctttttgtagtgcttttgctaaatctgtaagcgggcctgtaaataataatgttactttttctgattgtctctttaaagtttgaataatgtcttcaaaggcttctttgtcgctcacatttgaagcaacatgtttgactggctcatttaaaattggcaatgcgtccataaaaaaggcatgcatacgccattctttaggaaatggattttttcctcgttcatatgatggcgcaacttgaatatcttcatttgaaaaacgattaataatttttactgatgcgctcaaagatggctctaaataacaatcagcaccaattgtactgacccctatcaattgaacgttttccatttgtaataataaaaatagagatactaaatcatctacaccaccatcgtggttaaaataaactttcttagtcactcgaaatcccccttacatttcattttccattaacaatattatgtttttataaaacgttgttatatatctttctacaaaatcataacattctgttgtaatccttttaaacctcttctttaattgaaagccattccctgatatcccttccataaagtatgcactaaaataattatgatataacttattaataaagagatacattgagctattttctcaggtatactactttagctataataatactaatctatcattaattaaattgaacgataacaacggcacttattatttaaaaaaatacaaatatctaactttctagctataaaaataagagcctaatacaatatcaaaagattgatatgtttcagactctcatttcactaacttatatagctgaattattttgcagctttaattaatttttcttttaaatctttacgcatgaaatctaatgtataaggatcgttgtaccagtatgtaccagcatcaactttaacaatatgtccttctttagtagctttcaaattcttccacatgtttgttgattcgtatcctggtgtaggtttaccttcacttgtactcacaatgtaatcaccagcatatttttcaatttcttcttgtttcacttcagcccaacctgcttttgcagttaacttttgttgttctggttgcattttcaaaccaaatgcttgatataatacttctccaccacgaccccagttatcgccgtaagtgtataattttttatcaaattcatcaaacaatgacactgttgcatcttgtccaattgcttttttaatttctttaccgtctttagcagttgtttcttcccaatctttcttccaagcttttactttatcttctttaccaacaattttccctaacatttcttgttgttctaaatatttatgcttattatagtcaacaactactgttggtgctactttttgatattttttaatatctttgtcagtagagtatacaataattaaatctggcttttctttagcaactttttctacatcgccatcaccaatttttgtaacacctttaaatttatcttttaatactttgctttgatcgacttgttgatttacagctacaatgtttgcacctaattttttaagtccaccagcatatgttggcgcaactactgcaatgcgtttagggtctttcggaatatctaccgttttgccatcgtccattttataagatttagtttcagctttgttatttttttcaccttggttcccacacgcagctaacactaataacataattattaatggtaataatagttttttcataatttcctcctattgaaaatgattatcaatcattcaaaaattatacaagattgcatatacatttacaatagctagtgttatttattttttattttcgcaaaaaatttaacaaaatatcttaacatccctataaatccccacaaaaaaagggtaaatccgaacgtcaaatttcatctctttatgccaatcaacgatcgatttaccttttaaaatttaaaatgtatctgtaatactcttagcaatatttgtatatgctgcatcttccataggtggattgtgtaatcctgcacgcatgtcacgatagtaacgttgtaatggtcgattcatttctaagcttttagcaccaactattctcatcgctaaatcaatcacttcaagcccttgattcattaccatcactttactcgcacttgttggatttcttatctgactgtcatctttatattgttgatacccttttgctgtactccataaaaattgtctcgcacataacaatagcgtttccattttccctaaattttgttgcacagttggcaatgttgcaatcgttccttcaatactattagggctatgttggattgcaaagtctacagcataatttctagcagcttgtgctatacctaaataacagcttggtatatgcaatatccaaccatttggcgctttacttttctctgtttccactaaatgttttaatggtacttttacatcatttaatattaaatcatgactttctgtcgctcgcatacctaatacgtcccaattatcggcaatttcaacaccaggcaaattcctgtctactaagaaaaaaccaacactttctaattcttctatataagcagcaacaataatatgtgttagtgctttactcattgatgtatatgtcttcacaccatttaaaatatacccatcatcagctttaacagcatgtgtacttggtcttccccctcttgttggactacccatttcagcttcactaactgctctattaactaatgcaccattattaatttcaacagcaaattgctccaacatatcttgagaccataatttctgttcataaatttgtcctacgacactcacatgccaaccaatagataatgctgtggcaccatcaagttcgcctaaaaatgattgcaaaataaccatgtcttctatggtcgcaccttcaccaccatatgcttttggtaacgttaattttccataaccttctttaattaaccattcaatatttttatatggaaattggctatgttgatcattatattcagctttagccttaaatgtatctctaattactttgaatttttcaatccattttctttgaatttccgttgttattaaaaaggaattatccatatcattcatattagtcaccccacacaacacacaatataaattatttattcctagtttaacactcgactttaaaaataaaaaggaacgtgctgtgaacaattaaaagaaaactgataattcgattaagtatgcacttaattttatccataaaaatacaccttaaactatacaattcgctgtatagtttaaggtgatattcaaacaatattaggtttgatttaactatcaagcatctactttgtcatgtttaataccagcaaataataaaatccatgtcacgataataaatggcaatgttaatgcaggtaagccaaacggttcaagcaatgttgttgtacctagttgcaccactactgttaataacacacctaaaaaagtcgaaatataagggttaatcgctgttttaaatgtatatcctagtgcgattgccattaatacaaagttataaccgaataatccctgattaatatcatcataattaccacctaatagagctacaatgataaagcttaacaaactagctataacagctaagagtgttgcttttcttgatgctatcaatatgccgattaaaatacatacgccaccaattacactcgcttcgataaatacttgactgaatccttcaaataatgactgaatgaaatgtattctatcattgttgctaaaattaaccgtttcaatgttttgaggcattaactttaacgatgtatctacaaatttaacctgtcctgaaagtaaaattgtaaaccaagtcacaatgacaaaaggcatcgtcagcatcggaactttatatggtcttaaaacttctctcactgcagcagcaactggtaacgttaataaagttgctatcattgttataacaatatctaatcctgacttatctaaaaagattgttaacgcaatggcagttagcactggattaaatccagctaacccatcattaatctctgcctcactataatttataaaacgcgcaaaagtataggcgatgatgctacctacaatagccgctaatccaattgtccaatcggctacaaataatcctattaagataaataatcctgtccatttattactaattaacacaacctgagatatatttttcaaaagcacatctattatcttcaaatctttcacctttcctttgaatcattactcattaatatactactattctatgaaaagttatattaaaaactattttggtttttacataaatatattccactatttgttttcgattagattgtttgcttcaatatcggatatgctaaaaatataattttctaattacacattgaactttgtatattacttgtttatcacaacaattaggattaatataaattttgtaaattgtatctaatatgaaattgggggttttaatttgcattttacacaacgagagcaagacaaattaatgattgtagtggcggcggaagttgcacgtcgtcgtaaagcacgtggtttgaaactaaatcatcctgaggcattagctttaatcagcgatgaattattagaaggtgcacgcgatggtaagaccgttgcagagttaatgagttatggtagacaaattctaaacaaagaagatgtcatggatggtgtcgaacacatgattacagatatcgaaatcgaggctacgttccccgatggtactaagttaatcacagtacatcaccctattgtttaaaggaggcagtcaaatgataccaggagaaattattacaaaaagtacagaggttgaaattaataaccatcatcctgaaacagttatcgaagttgaaaatacaggagatcgaccaattcaagtgggctcacattttcatttttatgaagcaaatgcagcattagatttcgaacgtgaaatggcatatggaaaacatttagatattccagctggagcagctgttcgatttgaacctggggataaaaaagaagttcaattagttgaatatgctggcaaacgtaaaatttttggttttcgtggtatggtcaatggtcctatcgatgagtcacgtgtctatcgcccaactgatgaaaatgatgaatatgcaggtgtattcggagataacggtgctgaaaacgtgaataaaaaaggaggaaaaagatcatgagctttaaaatgacgcaaaatcaatatacgagcttatacggtccaactgttggagattccattcgtttaggtgatacgaatctatttgctcaaatagaaaaagactatgcggtttatggtgaagaagctacttttggtggtggtaaatctattagagacggtatggcgcaaaatcctcgtgtaacacgtgatgacgtgaacgttgcagaccttgtcatttctaatgccgttattatcgattacgataaagtggttaaagctgatataggcattaaaaatggttatattttcgccataggtaatgccggcaacccagatataatggataatgtcgacattattataggttcaacaacagatatcattgccgctgaaggtaaaatcgtcactgctggtggtattgatactcatgttcattttattaatcctgaacaagcagaggtcgcattagaaagtggtattacgactcatattggtggtggtactggtgcttcagaaggttctaaagcaacaactgtaactccaggtccatggcatattcatagaatgttagaagctgccgaaggtttaccgattaatgtcggttttacaggtaaaggacaagcaacaaatccaactgcactcattgaacaaatcaatgccggagcaattggattaaaagtacatgaagactggggtgcaacaccatctgctttgagtcatgcattagatgttgctgatgaatttgatgttcaaattgcattacatgcagatactttaaatgaagcaggatttatggaagacacaatggctgctgttaaagaccgtgtacttcatatgtaccatactgaaggtgctggtggcggtcatgcgcctgatttaattaaatccgctgcattttcaaatattttaccttcatctacaaatccaactttgccttatacacataatactgtagatgaacatttagatatggtaatgattactcaccatttaaatgcggctattcctgaagatatcgcattcgcagattcacgtattcgtaaagaaacgattgcagcagaagatgttctgcaagatatgggtgtattcagtatgattagttccgattcacaagcaatgggccgtgtaggtgaagtaattacacgaacatggcaagtagcacatcgcatgaaagaacaacgtggtcctttagatggtgattttgaacataatgataataatcgcatcaaacgttatatcgctaaatatacaattaacccagcaattacacatggtatttctgaatatgtaggatctatcgagccgggcaaactagctgacattgtcttatgggacccaattttctttggggttaaacctgaattagttgtaaagggcggattaattaactctgccgtaaatggcgatgcaaatggttctatacctacatctgaaccgatgaagtaccgtaaaatgtatggtcaatacggcggaaaccttacaagtacgtcaatgacattcgtgtctaaaactgcttatgaaaatggtatcaatcgtgcattaaatttaaaacgcatggtgcgtccagttaaaaatattagacaattatctaaagcagatatgaaaaataacagtgcaacacctaaattagacgttgatccacaaacatatgaagtatatgtagatggagaaaaaattacaagtaatgcagcaactgagttaccattaactcaaagatacttcttattctaggaggaacatagaatgattgttgaagaaatccaaggcaatattgccaatttgtcaaattcagaaaaacaaaagcacgtcgaaaaagtataccttgaaaattcagatcttgttaaacgtattcaaagagtcgttacagaccatggcactgaaataggcattcgtttaaaacaacctattgacttacaatatggagatattttatacgcagatgaccataatatgattattgtggatgttaattcagaagatcttttagtgattcaaccaagaacattgcaagaaatgggagatatagcccatcatttaggaaatcgtcatttgccagcacaatttacagagactgaaatgctagtacaatatgattatttagttgaagatttattaaaaagtttaggcatcccatatgttcgagaagaccgtaaagttaataaggctttcagacatatagggcattctcatgattgatcatacacacttaagattatttcagttctgtgattcacagtttccaacaggtgctttcagtcattcatttggtcttgaaacatatattcaacgaaatataattcatgacgatcatacttttattgcttggttaaaaatgtttttacaagagcaacttacctattctgatggtttagccatgcgtttagtttatgatgcattggaaaatgatgatacacaaaaagtattacacatagataaactgatgtttgttcaaaacttacctaaagaaacacgtgttggtgcaaaacaaatggggactcgcatggttaaattggctttagaactttataatagcccatggattgcttggtatcatcaacaaatgcaagataagaaagcaaagttaaatccagctatttgttttactatgctaggccatcatttaggtgtagatattgaaacgattattgattactatttatatcaaaatgtttcaagtttaactcaaaatgctgttcgtgctattccacttggacaaactgctggtcaaaagatagttactcacatgattccttatatagaaggaacaagaaagcagattttcgaattaaaagaagcagattttggcatgacagcgcctggtttagaactaaatcaaatggcgcatgagaacgtcaatgttagaattttcatatcataggaggttataattgtggcaaatccgattaaaattggtattggtggtcctgtaggtgcaggtaaaacacaattaattgaaaaagttgtaaaacgtctttcaaaagaaatgagtatcggcgttattacaaatgatatatatacaaaagaagacgaaaagatattagtaaattcaggagttctacctgaaagtcgtatcattggtgttgaaactggtggatgtcctcatactgcgattcgtgaagatgcatctatgaactttgcagcaatagacgaattattagaacgtcatgacgatatagaactaattttcatagaatctggtggcgataacttagcagcaacatttagtccagaacttgttgacttttcaatatatattatcgatgttgctcaaggtgaaaagattccacgtaaaggtggtcaaggtatgattaagtcagatttctttgtaattaacaaaactgatttagctccctatgtaggtgcatcattagaacaaatggctgaagatactaaagtatttcgtggtaaacgtccatttacttttactaacttaaaaaccgacgaaggtttggatgaagttatcgattggattgaacgcgacactttactcaaaggattatcataatggatgaacaacaatggactgggcaacttgatttaacagtgtttttcgatggcaatcgatcagtatcaagagatattttctttgaaaaagcacttaaagtgatacgtccagtttatctaaatcaatctaccattcctacattttatatagtaaatgtaggtggtggctatttagatggagatcgttaccgtatgaatgtgaatgtcgaagataacgctaaagtgacattgacatctcaaggtgcaacaaaaatatacaagacaccttccaatcatgttgagcagtatcaaacttttaatttgaaagataacgcatatttagaatatgtcgctgatccaatcatcgcatatgaaaatgctaaattttatcaacacaatacgttcaatctcaataattctagttcattattttatactgatattttaactcctggttattcaaaaactggcgaagccttcaagtatcaatatatgcatttaataaatgaaatttatattgaagatgagttagtcacatatgataatttattattgaatcctaataaacaatcgatcaatgaaataggttatatggaacattactctcattatggctctgcttacttcatacacgaagatgttaaccaaaaactaatcgattcagtttatgaaaccattagttcttatagcaatacattcgattgtcgtgttgctatttctcaattgcctacacatggttttgcagttagaatttttgcttatcgcacacaaattatagagaaaatacttggaaccatccaaagctatatcgcagaaaatatttatgatcgtaaacttgattttctaagaaaatattaaaataaaaagactagtgtaccttgtttcaagcttaataagctgaaataaggtatggctagtctttaactttaattaaagcatcttcaatatttaaattttaagttaattttatgtcccaatgctgaataaataacttcgttttaataaattgttatcgttcaatgttattaaacgcaattaaccttgatttaatttttaatgtattcttctaattctgaaatcagtttttgaatatttgctttttgtgtatctgtaacataaacaataactgttctttcgtcttgtaaacttcttttctttgataacaattttaaatcttttagcttttgtaaagctttagttaaatagtaaggtttgaactctgagcacttagcaatctctttagatgagatttcgttagactcacttcttaaaatatgatttaaaatataaatttcttcatagttcaaattgaacttcttttttgtatctctgaaaaacttcttaacttgaaatgttgcgttgactaaatcattaatgtcattaattttactcattattaaaccactcctctgatgcacatcttgttgtagcaaggttcacatgtaatttattaaatcgaaactctatccaactatgttataaagttcattctaaacaaataagtataaaaattcaatatttttattactagaatatggttaaatacatttatttcttataataatttgatgtttaagatattttgccaaattgaaaattattagtctgaatattttgtatcttaactgatatgtaaacttttaaaattttaatctatatcaacgtgtttgatttgatattttttatattaattggatggcttgctcacaaaatttataaaatataaaaaaagaagagctttaaatcataacgcatgccatttatctttaaatgcaatgagttatcattcaaactcttcttatcaacctacatacattgacattatactatcatatgttgttttacatattcaacaaacatttcaacgttagcacttttaatatcatgcattgggacattaccaatattaaatttgaacattatagtttgaccatcataatctatcttctctatttcattataactaatacttctataataaaattggccattcatatctacattcataattaatctttcatttgttgctataaatgccccttcaaattcattctcaccttgaacttgatactcaattattcctagcactgacggaccctttttttcagttggaaataaatcatttggattcacattatctaaaatcataatatccctcccacttaaaactataaactattcttcataggtatatgaaatacaagtgattaactatttattattaagattaacttgtattcccttttcaagataattataacatgcttgaataagcatagtgactttagaaaacttttctcgcttgattgttacaataacacgcctttcatctaattcacatctctcttttttaactaatcccttcaaaattaaacactttaaaatcgggctaaccgcaaatatcgggtgatggaattcaccctgtaattctttaaccgtcaattgacctttatgcagatttaatattcctaaaacgtataactcttctaatgataattgacacatatttaaataacactttagattccgcaataattcttgtgacgacaataaatacgatacatagtcacaactaaaatcaaatgtatattgaccaaaataacgttcaatatagtcactaagctcattattcatatattctattttatctatatgcattttattaatcgaaatagtcaatttacgttgatccctttgatctcttcctttcaatagccattgatgattgtttaaataacttaacatttgaagaagggccatcttagattggatttctttcatttttaataaactatctattgaagcgctattggaatcagaattatcatatttaactaatagatttaatagtttcacttgagtcaaagtgagatgaaatgaatatttcaacatatcattaatgactttcaacattagtatgtgtgcagttaaacgcttaactttaaatttagacatctttaaaacctctcttaaaccatgcctatatctcaagatgatatttcaaatgaacaatactattgcttgagaccattaatgaatgatcataaatatttctttctataaaattagctttccaataactgtgttgttgcataatatcattcacaagtacaccattttcggaagtatgattatctttatctatacttaaaacaatttgtttagttttagcatggctaaattgttgaagacccttacacgataaacgtatagcgtctgaattctcatttaacaatgcggctggcaaacaaatgacacattgtacttcatgtttgaacttcgttacaatcatcgtgtcattttgataaataacaatccctcgtaattgattaagtatatttatgataaaaatgaatattgataatctagttaaatttatttctttgctcgattcacttataattgacatgtgcataataagtcctcgaaattttgtataatttgtcaaaagttcagaaaccttattaatatcagacattgtgattttttcttttaagtcattattctcattaatcaaatctacatcacatataattttagaacgtgcaatagacacctgttctatttgtcttagcggtaagataaaatagtctattagatgatcaatttctttatcatagcgcgtattcaactcttttggttccagatgatatattaattcaaatactcctatataattatctattaaacgtttcagtttttgaattgcagtagtatttaagtcgttaattaaaaatgcaatcttacatctattactctcaaaagtcatattaaaaattgtagctactagcttttctatcttgcctctttcagcactcgttaacaattccttatattcatgtttaatacgaaacactacatttacattgtaattcactatcttttgaagtaataaagtgatttgttcaatcgatagctcattgcttgtgtcgattgtaacaattatatgcaagttttcaggattaacacctaatctttgaatgatttgtttaatagtataataatccatccaataaaaattacttcctttaatataaatgtttttaggttgatacatttgactcctttttgtaggctcaaaaggtatatcaatctcgcgcatacttgaagaactttgattagtatcatcaaataattcaattatatttttatcaatttcaactaattgggaatggttaattgaatgagatgttggactatatctttttctaattaatttaggagtgttaccatacgtttctttaaagaggtgtataaaacgagaataatgattaaaaccatgactacttgcgatttcttcaataggcttcttagaagttaaaatatcaattaagcaatgctccagtctaatatgatttaaatattgaataaaattactataaggtgtcgctttaaacatgtcacttaaagctttgtttgtaatactaacttgattaatgacatctttcctatttatctttttatggtggttgtttgttaaataatcgtgcacttcttcggctactaaatgacgactaccatcgtatgtatttaatgacattaattcaacacacatgtaattaataatcttatcattagcattataagactgttgtttaattttgctgtagattaaatacttaatcaagattctaaaagtgctagcaacctcatttgttaatatcttgccacgcatcatatagtttgcattcataaacttcaaaaatgtctttgcacttacttcaacaacacaacatacactatcatcattaccatcaatttgatacaaatcattcaacataataatggtgacatcatttctttttacatcatattgttgtagattgattgaaactacacctgtaccttgtagccaatatataatttttaagttcgcttccttcacactactcattttcatacttttataaatatgtagtgaataattatctgtcatcttacatcctcacatatacaaatatattgatttactcctgtttgtctttctcaaatcaattgtcaacatctaatattcactaccaattatatcgccacatgttttttagcagtaacaaaacataaatcgattatatcaaataatacttttattaaaacatttttttatgctaaattaggatattttatccattaaatatacattttcatccaaataccaaagctttcataatcatagaaacttgatcgttcgtgtcgaatttttatgcattttctgattaaaagtcctatattatgcacaaaatatacatttagaattttcagtaatattacaaatttgtaacagacttattttcgaaacattcagttttcacaaagaatgccgtagttataagttttgcaaaatgcaaatttctatacttttaaaattctattgtgtcaagatattagcaaaaaattacaaaacgttaacaaagcacacaaggacgctaatttctgttatagtctttcttgtcgtttaattacgagagataacttataacattaattttgtcacacggacattacgaaaatattttagatttaaaatttttaggaggatatttttaaaatgaagaaaatcgctacagctactatcgcaactgcaggattcgctacaatcgcaattgcatcaggaaatcaagctcatgcttctgagcaagataactacggttataatccaaacgacccaacatcatatagctatacttacactattgatgcacaaggtaactaccattacacatggaaaggtaactggcatccaagtcaattaaaccaagataatggctactacagctattactactacaatggttacaataactataacaattacaacaacggttatagctacaataactacagccgttacaacaactactcaaataataatcaatcatataactacaataactataatagttacaacacaaacagctaccgtactggtggtttaggtgcaagctacagcacttcaagcaacaatgttcaagtaactacaactatggctccatcatcaaatggccgttcaatctcaagtggttatacttcaggacgtaacttatacacttctggtcaatgtacatactacgtatttgatcgtgtaggtggtaaaatcggttcaacttggggcaatgcaagtaactgggctaacgcagctgcaagagctggttacacagtgaacaatacaccaaaagctggtgcaattatgcaaacaactcaaggtgcatacggtcacgttgcatacgttgaaagtgttaacagcaatggttcagtaagagtttcagaaatgaactatggttatggcccaggtgttgtaacttcacgtacaatctcagctagccaagctgctggttataacttcattcactaattagtgatggctatgtttacgccaacaaggtttcaagagccttgttggcttttttaatttctatgaaaaaaatcgaattggtaaaaatctcaaaatttcgattttcaccaatccgattcactctgtaataaagaataaacaacatacagccattgacacacccaaatttaggcatgtcaaatcggctatacattgataaatttttagttaaagtacttacaaatatacttgccttcaaattctcaattaatttagtcattacaaatcatgacataaaacttacattacatatatcaacatgttccgctacaaaacatattcagtatatgtatagaggatatttattctaagttaaaaccttttcaaattataaccgctacaattataaatgattaaagtgtttcaacatattatatatattccacgctcacattaagttaaacgtgaattcgatgactttttaatacctatccctgtaaaaccatagataattgctataattgcgcataaataacatggtactgtccatatgaaaaattcttcaacagagacatgaagttgattcgtatagtaaatacctgatgttccccatggtattaaaggtaagaccatcgtacttgagtcttcaagtgttcttgataaaacggaacgagagacttggtatttttcgaacaaatctttcattaacacaccgaccataataattacaatcgaagcaacacctgcagcgaatacaagcgcaatacaacaaataacagtaatacatattaaacttcctacagaatggatgcctttagaaatagtagttaataagacttctaaacatcctgctttttctacaatacctgcaaatgcatatccgcaaaatatcgttactaatatttgggtcatactcatcataccaccctgttctaacaagcttttcacactggatgaaatatgagactgatgtatcattgattcgttaaaaccactaaatgttgctttgaaaccatctgtcattttgaaatgatgattaaaagtccccactataatggcagaaaagcttgatattagcatagctggcactgtagccattttaaatagcaaacaaacaatgatcacaattaagggaacccagacccatatgttaatttgataaatctgtgcaagctctgataacaaagtttgaatctgtttatcatttgaatgccctttaaattgaaatccagcaataaaccatactaataaacctatgattgatgcaggtatcgtcgtccacatcatcgaatgtatatgtttaaatatattaactttagtaacaagcgccgctaaattagttgtatctgataatggtgacattttatcgccaaacacagcccctgctataatagcacccgctgccatccctggaggaatccccaattgattaccaatagaaataagtgcaatccctgcagttgatgcagagccccatgctgtaccagttgctacagatgtaacagcacttataaaaaaggctgatattaaaaaatagcttggattcaataaatctaagccataataaatcaaggctggcactgtgccagaaaacatccaactgcctactataattcctaccgctagtataattaaaattgcaggcattgcagtatttaaacgttctgcaatgcctttttctaaatcttgccatgttaagcctacacgttttgcaatccatgtggcatatgctgaggcaataattaataatacttgaattggaatatcaaaaaacacaaagcctgttacaacaacaataaccattacaatcattgtcgaaattgattctaaaaaggtgggttttcttttcatcatctatcgtccccttcgcttattgatgagaaacctcttttcttcaatttattgcttttgcataatgctatatccttttctatcttcaagccatcatttattttaaatatttttctaaatcaagcttatctaaaccaatttcttcaactgttaagccttcctcaaagaagtctctctctaaaatggttgatgcaattacaattactgcatctatatttggtgtcggtacatcaataacacgacctaagcttgaccatagtactaaaccatatgcaatatcttcagttaaatatctgctttctacatgatttggtcctggaatttgtgaaaatactgggcttgtattaaacaaacgatttaatggttcatcttctttatcacgttctaaataaccacgttcaatacgtgattctttagctgttgataattcaaaacctaatctacggcctaaattcaaacgttctaattcgattgcatgaagtaatctaactgtatgtttagtaattccttctttatataaagcgaactcgccagcataatcaatgcgaccgacattcaataatgttggtcctggatgcacttcaggattaccattttcaagatttgttttaattaagctttcctcttttactaaatgatcataaatacttgaaactttgtcataacaatcatttagacagcttctatcatatgttgaaaagaagatacgacgtacatttagagataaatcaactgctgcattttcaaaatcgacacgcgtaccatacgtcaacgtattagcttccgctagttgtggttttgtttcaatatgtctatcttctaaaacattcataaaacgaattgaccccattgctgcagccatgttgaagaatatcaactgattatcagttacatgctctgccattacatcagcataatactctatgtatgaagatggaataatcacttgaacaatttcagcatcttttaaaacatattccatatcatcactaatatcagtgaattttacgaaacgttcatcaccttcattattaaaatcaaatccgcccttttcgattgcgttttgaaacttacttatagattgattacgacaatataatttaacatcgtggcctttgctcaccatatctactgctgccgtaactgcgccatttcctgatcctacaattgctattttcataaacaaccctctttctatctttggttaaaattaaaaacaaattatacgtaagacaatataaaaatgatgcgaattcattacgcatcattataaatgttaagtatatataaccttaaattaacctatttaaacgccgacgtccaccaattatttttatttttaataattgtttaataaacatgtttatttttgattatattttgttatagttaaagataatattacaattttcaaaggagtgtctaatatgacaactgaaatgaacgacgtaacaaatcatcaaccgaatcgcaaatccaatgatgagaacattatggcgatgcttatctatttattaagtttattcacatctattattggtccactgataatatggttattgaaaaaagatgaatcgaaactagttgatcgtgctggaaaaaattatcttaactatacgatttcttatattatttggtctatcgttttagtcgttatcactttaataggcgttttcctaattgctacagatattgatttcattattattataggtttcatcattacgtttatcggtattttatccatattcgctttctcaatattatcttttgtattcacaattattgcgtgtgtcaaatattataatggccaagaatatataatacctttaacaattcgatttatttaaacatattacaaataaatatttcctattaattatctgttaatctcattgtaactttgactaatttttattacaaaattagtcaaagtttttttattcttttacaaatcaataacattccccacaagaagcattaattttgttaaagtaactattgtcatcaattcgagatgtgagaataaaacagtcgctacgttttatttataaaaaaagatatagaactttggaggactttattcatgaaaaaattagtaacagcaactacgttaacagcaggaatcggcacagcattagtaggtcaagcacatcatgcagatgctgctgaaaattatacaaattacaacaactataactacaacacgactcaaactacaacgactacgacaactacgacaactacatcatcaatttcacattctggtaacttatacactgcaggacaatgtacttggtatgtatatgataaagttggcggagaaatcggttctacttggggaaatgctaataattgggctgctgctgcacaaggtgctggattcacagtaaatcatacaccttctaaaggcgctatcctacaatcttctgaaggaccatttggtcacgttgcatatgtagaaagtgtaaacagtgatggttcagttacaatttcagaaatgaattatagtggcggacctttctcagtaagttctagaactatttctgcaagtgaagcaggtaactacaactacatccatatttaatataaacacgatgatacatattgtcttgaaacttaattctagtacatatgtcatcaaaaaactttgagctttcctttataggagaagctctttttttgctatttttcgttgccacctacttatttatatttcctcccatattcaaaatattaattttttctaatactattaactttaaaactacgttatctaatttaattgatccagtttttccacattacaatattcatagttctacagtgcctaagttatatcacctccatcaaaagtacacgcttacatcattgatacacaagacatcatgacatagttgtatactgtctaatcttctactatactaagataaaaggagtgatcttttatggaaaaagtttatgttgctggtgcaataccagaagtaggtttaaaacttttacaagaacattttgaagttgaaatgtatgaaggtaaaggattagtcgataaagacactttaattaaaggtgttaaaaacgcgactgccttaattagtttattatctacaaacgttgataaagatgttatcgatgctggtaaagacttaaaaatcattgccaactatggcgctggttttaataatattgatatcgagtatgcccgagaaaaaagtatagatgttacaaacacacctaaagcatcaacaaacgcgactgctgatttaacaattggattagtacttgcagtagcgcgtcgtattgttgaaggggaccaattatcacgtacaactggatttgatggatgggcacctttatttttcagaggtagagaagtatctgggaaaacaatcggcattatcggtttaggtgaaattggtagtgcagtagctcgtcgtgcaagagcatttgacatggatgtgctatacactggacctaatcgcaaagaagaaaaagaacgagaaatcggtgcaaaatatgtagatttagatacactattaaagaatgcagattttatcactatcaacgctgcttataatcctaaaatgcatcatttaattgatacagaacaatttaaaatgatgaaatctacggcgtatttaatcaatgcctctcgtggtccaatcgtgcacgaacaagcactagtgcaagcattgaaagataatgaaattgaaggtgctgcacttgatgtatatgaatttgaaccagatattaccgatgacttaaaatcacttaataatgtagtattaacaccgcatattggtaatgctacatttgaagcacgtgacatgatgtctaaaattgttgctaatgctgcaattagtgccgttcaaggtgagaaaccacaatttgtcgttaactaataattgaatttattataataacattataaaaacaagaacccccatatgttgagctctcgtttcaacatacgggggttttcatattgttgtattatttttctttcgatttatataagaatttagtttgtccagctgctaatgcatttggcatcattttcataatacgatttctaactgcaacaaataaacgactacgatattgggcaattttaccgatttttctagaacgcttaattacttttgcagtatgtttgacacgtattttatcataacgctgtaatgctttttcaaagtcgtatgcgttaaaacaatttactaatacgatagcatcttccattgcttgtccagcaccttgccccatattaggcgttgtcgcatgtgctgcatctcctagtaaaatagtacgaccataaacaaaagatttgagtggtttcaaatcataaatattatgcaataagatacctgtttcactttgtttgtctaagatctctctaacttcatttggatagtgattaaagtatgcttgcaaatgaggtttaccaaacgaactatatttatgattgttttccttcgagttaattgtaatgaaccaatatgcttgattatttaataacggaacaatacctactcttccttttcttccccagtattcttttgcacaatctggatgctttaaatcaatatcatcaattaaacctctaaagcatgtatacccttgatataatactttactgtcagcatttacagattgtctcactttagaatgaattccatcagcaccaatacataaatcaaatgcttcactttcttgttccgcgaaatgtatggtaactttatctgtctcattatctatatgcgtgacttcatgatttgtaaatattgcgtcatcttttacataagatttaataatgtcaattaatgtttggcgtggtaacgtcacattcaatgtattactttttaatttaacagtagttaacaggcgatctttgtcatctaacactgtcattgtagataagatttgcccagcatttttaatacctttagctaagtcatgattacctagttttttaagcacattatctccgataccaatcccagcgccaatttctttaactgactcatttttttcaaagactttaatagtatgaccttgttcttgtaataatgcagcagctgttaatccaccgatgcctgcacctataattgctatcttcatattgtcacctctatatttttcattcttttctattttatcacatgcactattgtttaaaaatgactcttggaactaacgtttcatttttaaggacttaagtgtattatctgcaccattgtatattacatgcacatttagacagcaatattcatttacatcatgtacatttgtaacaatgatgtgggatatagcatatttgatgctatatagcgttttttgttaggttaaaatccatttaactaacacactcagaatgcgctaaaggagctcgaaacaataaattgttccagctcctttaagcaccgatgtcttatttataatatgtttgtctaatatcatctttctttataccaaactgcttataggatttatccattaatttggcaattttatctgcccagcgaatgtcactcgcatattgatgttgcgcaggattttctggattccatcgcatttgatataaattcagttgattgttttcaaaatattcattacgaatgaactttgcaccaccaataatcgccttatctggtgatgtccattgttccttttcagcataacttttcccactacgaacagcactactatcgaatgctcctataccaaaaaagttgtaatagcgttttttcccatctttaatgccttttgctaattctgatttgccgttacctgtttctactaatgcatggctaacaagataaatgacattaacctcatatttttcttgagcttctagaaaaactttccctcgattttctaaaatccccttaccttttagcaattggttaacttcagattccgacattggcactttttctgtgatatccatatacttcatatcattgtctttatgtgaaatagtcattgctttagcaatttcattattatttgcttcaacaaatttaccatcctcttcttttgtctgtacaatacctttcccttgttgcattgaaacagcctcatcaaaagagtaattcacatcatttttaaacaatttagtttcattcacgatgagtaatacagcaaaaacaactaaaataactatcaatagtagcgttgaaatgcgtaacttgaaattcttcttcatatagacaaaacctcatttttcttacttagacaataaaaaatatgccactacaatcgctaatattacgattaaaaaagaagcgttaacgattactttcatcgttgttctatctctgaacatcatattaaagacaactagactaattgataatgaaacagcaaaaaaagtaatagctaacactaatttcatcataaatagacagactaaacctatgactaataatgtattagaaattacagctgacgtttttaacattctcgaattaatatgcactcaccctttttatttaaataacttacataatcataataatacatgatgtttcataggcctgtcgatgattgattcacaatagcacgtgatttttttgtttttcaatattattcatttattccatcaaaaacaccctttttaatttttacaaaaattaaaaaaagtgctcctacactgcttgcatgtagaaacactttttcattgtaatgttattcttctcgagacataccttttagcatattaagcatgtatgttaaactacggttcatgtcgtcatctttcaatacgcccaatagacttcttatagttgtcttagcatttggactcgcttgattggcaacgtgtaatcctttattaactttatttaggaagtcgcttaaatctgatacattgagttcacctaataaaaataccattgaagccatattagataatagccctgtataaatatctttattaagttcaactgcaaatttatttatgatgacttgacgtcctcgaattgcaccatttaaagcatctaatagttttgcatcatctaatgttttaataagcttgattgcttttaatatactatctttattcgctgcaattgcctctgtaacttcatttaaactttctaacttaatttgttcttctgatttttctaagcgtctaattttagaagatattctctcagccattatttatccacctgatttcccgggaaaacataatctgaacgttcccattttttctgtacttgaacactgtactgcggttgacgttttttattgacacggaaattattagggttcaacggtgacttaccacgtttcgtaattacctccaaacgacagctagtacgtttataagatggtgtatccgtgtattgatcaacatcactattagttaataagttaattgcacctagatctccattttccatcgcatcattatttaatggaatatagatttctttacctttaacacgatctgtcacgtgaacttgtaataccgcttctcctgtttcagaaatcagcttaacttctgcaccttcatgaatgcctctatcttcagcaagctctggagaaatttcaacaaatgcacgtggcactttgtatttaatcattggtgtttgataagtcatattaccttcatggaagtgctctaacaatcgaccattgtttacatgaatatcataaatttcatcttgcttaaagtaattatcaaatgataatgggaataattttgctttaccattatcaaaattgaatccttctaagtatagaataggctcatcagtaccatcaggttgtactggccattgtaaactattgaatccttctaaacgatcataacttaccccagcatatagaggtgttaagcgtgctacttcatccataatttcactaggatgcttgtaattccaatcaaatcctaatctattagcaattgcttggaaaattttccagtcaggttttgaatcaccaagaggttctaatgcttggtataaacgttgaatacgacgttcggtatttgtaaaagtaccgtctttttcaagtgaaggacttgctggcaatacaacatctgcgtatgttgctgtgaatgttaaaaattcatcttggactaccatgaaatctaatttttcaaacgcagcttgtacaaaattaatatttgaatccacaatacccgtatcttcaccatataagtacaatgagtgtacttctccgtcatgtataccttctaccatttcatgattatctttaccagcttttggattcaatttaacgccatattctttttcaaatttagcgcgaatatcatccgcttcaatactttgataaccagtaatcttatcaggcatacttcccatatcactacatccttgaacattattatgtccacgtaatggatacgcaccagtaccaggacgacgataattacctgttactaataataagtttgaaatcgctgtacttgagtcactaccaatgtcttgttgtgtaatacccattgcccaacaaattacaacagattcagctttagcacattcttcagcaaatttaatcaattctgattcaggaatacctgttgcttcttcagcaaaagccattgtaaatgtttctaatgatttgtaatattcatcaaaatcatctacccactcatcaataaatgctttatcgtgtaaatcatgatcaataatatacttagtcactgcacttaaccacgctaaatccgtacctggtttaggttgataaaaacgatccgcacgttctgccatttcatgttttctaatatcaaatacatgtattttttgaccaaataatttttgtgcacgtttcatgcgtgatgcgataactggatgagcttcggctgtattagtacctatcaatacagacattgccgctttttctaaatcttcaatactacctgagtcaccgccgtgtccaaccgttctaaataagccttttgttgcaggtgcttggcaatatcttgaacagttatcaacgttatttgtgccaataacttgtcttgctaatttttgcattaaatacgattcttcattcgtcgctttagaagaagaaatgaatgatagtgcatctgggccatgcttttctttaatagctgtaaaattatctgcaatgacgtttaaagcttcatcccattctacttcatggaactcaccatttttccttactagtggtttagttaatcgttgatctgaattaatatgtccccatgaaaacttacctttaacacaagtcgcaattttatttgctggagaatcatgtgatggttgtacttttaaaatttctctatctttagtccaaacttcaaatgaacaacccacaccacaataagtacacactgttttagttttcttaatacgctctttacgcatttctgcttctgaatctgagattgcaaatagtggaccataaccaggttctgcttttttagttaaatcaatcattgctgctaatgaaccaggttccgtatcagtcatataacccgcattaccttccatattcacttccatcatggcattacatggacataccgtcgcacattgaccacaagatacacatgaagactcattaatcggtacatcattatcccaaataacacgtggatgttcacgatcccaatcaattctaatagtttcattcacttcgatatcttgacatgcttctacacaacgcccacataagatacattgatttggatcataacgataaaatgggccgtaatctttttcgtatggcttctctttatattcatacgtttgatgctgaagcccccatgcatccatcgtattatgaatttcacaatcaccattattataatcacatactgtacaatacagcatatgcttttctaaaattcgatcaagcgcttctttttgagcatctttcacatcattgttcacagtatttacagtcattggacgatcaatcaccgtactacatgaacgttcaattttaccgtcaatctcaacagtacatgtatcacatgtttgaattggtcccatcgactcgttataacaaattgaaggtacaaaagtatcttgtgatttaataaattcaagtaaattcgtacctggttctacaagataatcttttccatcaagtgtaaccaccaaatgttcttgcatattactcaccccgtctatatatattttccgtaaatgacttttaataaattgctcatatccacctaaaataacgatgccccacacatctttcagatagaattaatttaattgtattactttatgtactagttgttaagtaaaattttgtattttgcctttttacaatcatttttatttgaaatattttgcgcgaaattaaatcatctttttgtttaattgaaaataattatcattattagttttccaattatctgtttcacgctttttgccatatctttcacaaccttattaatgacaatatttaataatcacctcacctaaaaatcgttatactatttataaataccctttttctgaaaattaataacccaagtttgataaatatctactatcatttagaaggtaatatttatctttaaattaaatttgtaatggattaatttataaaaatcaaatcaggcattaaataaaatagcccataaatacaaagtgttatcaccttctatttacgggctattagttctattcgttattctatttacagatcattctatctaattaatttgtgtacaattttgataacttattttcccttagtttactactctagattatcttttaataacttagtactttcagcttttgactgctcactaggaatgaagtagtacaatccgtcactttgaatgccgccttgaccactcaattgatgtttattaatcgtgtcattagcatctttataattgcttctaatcgtattcaaatcacctaatgttaaatctgttttaacattattttgaatttcattcattagactattaaaatgtgtaatcgatgatgggcttgcaatcttattggccatcgcttcaagcacaatttgctgacgttgttgtcgaccaaagtcaccaccagcaccttcttctttacgacttctaataaacttcaatgcttgatcaccatttacatgtgtctgctgtccttttgtaaaacgaacaccatcaacagtgaatgtatcattacttactacatcaacaccgccgatgctatctatcatattatgcaaaccatccatatcgattgtcgcataatgatcaattggcacattcattaatttttcaagtgatttaacagccatatttggtccaccatatgcataggcatgtgcaattttttcagtagtaccacggccaacaatttccgctcttgtatcacgcggtatacttactatttcagttttcttcgttttagggttgatagataaaatcataatactatcactacgctctccgccaccctttttcttacgatcagcatctgaatcgacaccaaataaagcgattgtgaatggatcaccatcgtttaaactcacttttttatctcttaattctgaatgattgcgatctaacggattgtgtatcttattaccagtaataaaaattttagcagctacatacacaacagctacaatcgctaagattactaaaataccgaatacccataaaaatatttttttcggtaggctcattttacttttagacgaacgtttcaatcccaccactcctttactattccttacatactttgtctgttttctctatttattatatagtaaaataatttttttactatacttctgtagacgtataactattttttatcattttttatctctagagaatatctatctgtatttttgataaccaccatttgcatttaaaattttaagtaccgtttcatgacatgctttattacttataataaaaggtgcaccctttaaatgatcaattgccttaccatctaaagtcgtcatttttagattcaatagttctgcaaataaaaactgtgcagcaatgtcccaaggtttaggatttgtattaatatgtgccccaaattgaccttttgccactcgcatagaatctaatccgcaagcaccaactaaacgataactaaatgaggcgtcaaataaatcttgcaccgtatctagattcatcacttgtgcattaaacgatataatagcgtcttccaattttaacgatggtggttcttccatcttaattccattacaaaaagcaccttctcctcgtattgctttataaagctttttatgcggataatcatatacgtacgataacattggtttaccttcataaaaatacgccaatataatacaataatcttcttgctgttttactaaattggcagttccatcaatgggatccataatccataaatgattaatttcattcgtaatcatttcattacttttttcttccgctaatagttggtgttccggaaaatgtgttgctaaaaattgttggaattgttgttgaatctgtttatctacatttgtaactaaatcaaatcgatgacgcttagtttctgtagtcatttccataattaattgcggaataacattgtctatttgtttcaaccacgaacatattaacttatctatttgctgtaatgttttatctgtcatttcgtccaccacttctcatatcattatcattttattattaccctatattaaaagaatcaacaatacaactgaagacttcttcattttatgcataaaaaaatcggctagtcacgtgctagccgacaaatagaaaggaaagtaagtaataaatattgaagatgttgtgatgtaacttgaacgattaaaagctatctgttatatagctctacccctttgtttaatcgctccccctgttacaagtaatatcatagcacaatcttttttaaaatgtaagcgttttccacaaaatttttacgattttttttaaaagatattgaaaatgtcctcattgtcactcttatgttatactttgtgtaatatatcatcttttaggaggtggctgtcatgaataaagctgaaaggcaaaatttaataattactgcaattcaacaaaataaaaaaatgaccgctttagaattagctaaatattgcaacgtatccaaacgcacaattttaagagatattgatgatttagaaaatcaaggtgttaaaatttatgcgcattatgggaaaaatggtggttaccaaatacaacaagcacaatctaaaattgcattaaacttatctgaaacacaattatcagccttatttttagtgcttaatgaaagtcagtcgtactcgacattaccatataaaagcgaaatcaacgcaattataaaacaatgtttaagtcttccacaaacacgcttaagaaaattgcttaaacgcatggacttttatattaaatttgatgacacacaacatatgacactcccaatgctgttttccgacattttaatttattgtacagaacgaaatgtgatgttagtagatcatagggttgatgataatattaaagctgaaaacgttatatttattggccttttgtgtaaacatggacattggcatgcagtcatttatgacattgctcaagacaaaactgccgaactcgaaattgaaaatattatagatatttcgtattcattcggtaagacgattcaaaccagagacatatccattgataactatcatcaatttttaaaccccatcgattcctaaaaaacagcagtaagatgattttcaattagaaaatatcttgctgctgttctctatttatacaatacttcgtattgaatggcttcgctttcctagggtgccgtctcagccttggtcttcgactggcactgctccctcaggagtctcgccattaatactacgtattaacatgtaattttactttgaaatacttaaaaaaataaaacactttgcccaacttacactaccaatagaaactgctgttagaattcctcaaaatgatatttcgcgatatgttaatgaaattgttaaaaagatagctgatagcgaattcgatgaattcagacatcatcgtggcgcaacatcctatcatctaaaaatgatgttaaaaatcacctcatattcatatactcaatctgaattttctggccgtagaatagaaaaattacttcataacagtattcgaatgatgtggttagctcaagatcaaacaccttcttataaaactattaatctttttagagtgaatcctaatactgatgcgctaattgaatctttatttattcagtttcataataaaatgcatatcaaaaaaagctgatttctatcaaataattaatagaaatcagcttttttcattgcctaaaaacttaatgtcccgacctctttatctacgcataaatacttattactgatataacgaaagaaacaaaattatttgctatatgtaatgcaattgttgaacctaggtttcttccagattttaaataagtgaaaactaatatgatggatagtatgagatatggaccaaactcaaacggcgactttgcatcagtcacatgaataaatgcaaataagaacaccgaaacaatactcatagctataaaattaaacttcttacctaattctccaattaaaatatgtctaaatacgatttcttcaactattggacctacaatcacaattaataagaatgctacaggtaaaaatgcaggcacttcaaacattttatttagctcaagttcattggctgtttcactatattgcaaatgtttaggtagaaactgtgtcatatattcatatgtataaattaagatgagagcaataatatacgttattgacaatctaagccaatattttttgatatacgcaaaaccagctcgaagccttgatggcatcacttttaaatgaaataaataaaatgcgccaatcccaatcgtatatgctaaagcttgtgtgatagtcgctacaaatatcagattactatcgatttcataataaccaaacaaaattggtcctatgtaagctgcaattgtgagtgcataaaatataacacctataattggaattataagcaaatctctccatgctatatctttaaacgtgtatttctttttttcattttccactgttatatcctttcctgtttaataattgatttttggaggtacttctacatgataaacgaaactaagtatatgagacaacaaattactaatttgattcaaatcattgatacgattaaatataatactttaatgacagattggaacattcaaacgcatatttataaatttaaccaaatagttactaatgaattgaataagttcaaaggctttgaaacatcatatataataaacgaaaatcaagtttcctattatgaaattataacactacttaataaacgtcccctccgacaagtcgactatggtaacaaaattcaatatcttaatttttatcatacagaactatctaacgcattatttgcaattaaatttgcccattaacctatttttcataaaatgtcatttaaacaagttatttattaaaattcactttattacataaattatacaattaaaaagtttcttcaaattgtaaagatgcattaatcgagttataatcataatgattaagatggtagatttagtcttatataactacatttactaagatttaaatagatgagtacataatgtataaattgggaatatacagtatgacttacggtaatatatcaatatattgatatattatttgcacatgggagtatgctattttttatctatacatcttaaaaaaatttacagttttacaattcaatatcattaaacaaacaacatattcagcttatttttcattctcttacgttacaagttgtaaataccatcgcgttaaacaacaatagccaacgctaataaaatatattgcgttaaagtggagtgattaatatgtcaaacgtactaacagaaatagatagtcaatatccatatatgactaaaaatgaaaaaaagatagctaaatttatactaaattcacctcaaaaggtgattaaaatgaggtctcaagacttagcaagcttattagatattagtacatcatcagtcattcgattcagcaagaaaattactgatggcggttttcacgacttgaaaataaatatatctaaatatgttcctaaagcatcatcaatttacaatgttgaattaatgaataacgaaagcacagaatctttaagaactaaactccatacacgtactacacgcgcacttaatcatgcaaataacgaattaaatgataaaactattgatcaaatatgtcattgtttaaaacgttctgagacgatttttatatatggttttggcgcatcttttgtagttgctaccgacttataccaaaagttatcaagaataggtcttaatattcaacttgttcaagaaacacatatttttgctacattattagcaactcacaattcgaacgacagtgttattcttattactaacaatggtacgcaaagtgaaatgcaatcaatggttaaagttattgatgactaccatatacctataattacaattactagtacaagggataatcccgtagcacaggcatcaaatattgttttaacttatgggaaaactgatgaaaatgagatgcatatgggagcaacaacttcattatttgctcaaatgttcactattgatattttatattatcgttatgttgcattaaattatcacgcatcattagatttcataacacaatctaaaatggctttagataactatcgtaaacatttatcaaatattaactttaaacattaacagtcttatataaattctttaatcatgtcatataataatttatgcatcattttcaaagcttacatgtcttttatcttgtataacatacgcatatgaccaatgatttgataaggccattcaatttcttatattaaaaacaaacgcagttgattaacggattcattccatatatcaattgcgtttgttattttaataatgctattttttattttaaagcccacagtaaaaactaacgataatattgccacttataagtttttcacactacaacttcgatttaagctatatttataaaaaaatgcgcctactcataacattctttggctatttaactttaataagctagggccaagtttgtcataagataagcgcacattataatcatactattttgcttttacattatttttattatatctaataaaataataaatcgttacaatcgttaagaagatgacaccaataagcactgatattctagtttcaacattaaataccataccaaccaatactaatattaagaataagattgttaaatagttagttactgcgccaccaggcattttgaatgggtgaccttccaattcttcagggtgtaattttctaaaacgtaaatgactgaataaaatcataaaccaaggaatcatacctggtaaaatagacgcactataaacgtatacgaaaatactcttcgctccatcgatatataaaggtaaaattacgtttaataaagcaccaattaaaataccaagagatactgctacaacagtgtacaatggtacaccatttctcatgattttagtaaatattttcggcatttcacctttatgagcaagtgtataaatcatacgactcgcactgaaaatacctgagttacatcctgacattgctgcagttaatacaacaaagttaattaatccagctgcaaatgtaataccgattttagcaaatgttgcaacaaacggacttccaatgtctcctaattgattccaaggatacactgaaacaataacaaaaatagcgcctaaatagaaaattaaaattctccagataacaccattcactgctttaacgatatttttctgaggatctttagtttcacctgccgtaatacctatcagttccacaccttggtatgaaccaattacaattgataatgcaaagaagaaaccaacaataccatttggcataaatccgccatttgtccatagattagaaatacctaccgcatggccaccatttccaaaaccaaagaaaataagaccaaaaccagcaataatcattaaaataattgttacaactttaattaaagcaaaccaaaattcaaattctccaaacgcttttaccgagaataaattcgctgccattaataataaaatagcaataacaccaggaatccaagttggcaattccgggaaccaaaacttcatatattctcctactgcgatgacctcactcataccaactacaatccattggaatatattactccatgctgtcatataacctgctgcaggatgtatataatcacttgcaaatgttgcaaatgatcctgttgtagggtttaaataaatcatttcccccattgctctcatgattaaaaataaaaagatacccgcaattaaatatgcaaggataactgatgggcctgtccatttaattgtacttgtcgcacccatgaaaagccccacgccaatcgtaccaccaagtgcaatcatttgaatttgacgggcactcaatcccctttgtagttcattgttctccataacttcttaccccatctctgattgatactaaataaatccataaaaaaacttattgccgtaattatactataaattatcgattttggtacattaatatttgcataccatgcaatcgtttacagaactactatagcaggcttttgcaactttgcaaacaattattttgtgatttttctaaaaaattaaaaaagttgctcaagtaccgttgagtcacatacaacttcagctattcttggtaattatgatataattttaataatattaaaaaggagtatatcaatgttaaaacaaatactgctacgtgctacaaaaatatcggtactctttgctgtagcatttttcatcataaattatatcggtatggaaaaacctgacatcctatatttagttggaagaactattattgcaacacttgctttcatactcatttgtcttacagtatttactattattaattctccagagcgcaagattaaactcggtacgactttaccgattgcattaattattggtatcattttcggcgccatatttttaacggtacaaatcggtgtcatcactgggttaatcatcggtgtgattgctacgtttatttgggaattgattgaaaaaaataaaggaggtcgttcatcatgacaacagcattaattggtgtaattgtattaatcttactaattattagctttgtgccaaactaccgtgctatgaaatcagcaaaagaacaaggaagtaatgcaacaagagctacaattatggtaggcatagatattatcttaattgtacttatcatcgtgacgttattattaaaatatatgtaactatttaaaccaccctatctcatacataaacatgaacgttctaccatttcacatacatatggtcgtccatttaatgaggtaaggtggttttctcgttaaagtttaccttgtaatagtaaaaaatagccaattgttgcgagtattaagtaaatcattgaaccaacaacaaaagatcttacttgcacgcgaaatggtgtctgtttgttaaatataggaccaatcaccaaatttccaacgcctaaaattactggaccagctagaaaaaacaatataatgtaacccatcatgatacgcctcctatttcgtaaagaaacgcgctacaatttgatcgtaatcaatatcttttgctacataatctacattagaaaagtcctgtgcgcttgtcattttattcgtattaacaataacatctaatccagctgcaatcgcggctgttgcaccatttacagaatcttcaatagccaaacattgtgtcggcatataatttaattgttgtactgcagataaatataattcagggtcaggtttaacttgttcaacatcttctctaccaacaactacctctatataatcgtctagacctaatgctttaaaggtgggcattatttccgctttcacactacttgtggcaattgccataggaatgtgacgttgctttaaaaatgccatcaatgatttaatcgtatcaatcatcggtaatgttgtactagtaagatgatgttcttcataaagtttatctttattttccgaaccaatcgctttaattaaatggtcatgcaaatctgtagctgctcctccaatagaagaacgataaaaatcaatgcttataggatcggcattatgcatctctaaatgtttattaataacattaaataaatgttgttccgtatctattattgttccatcgaaatcaaatataactgctctatacatatatttactcctctattttttctctttatcaaagcttaacatagtccgatgaccacttcattctattagtgcaattataacttttttgaccaatactttgctaaaataggccctgttatattatgaatgaaactaaacactgcgcctggtactgctgcaattggattaaaatgcaatgctgctaatgacacagctaaaccagagttctgcattccaacttcaatactgactgctttttgatcttgtcgatctaattttaaaagacgagctaaccaatatccaatcgtataccctaatacgttatgtaaaataactactaaaaatattaataatcctgtagttaagatttggtgcttactgccacctacaactattgctaaaattaatgaaatagcaacaactgatataattggcaaagctgtagaagctttttcagcaattttacgattaataatttgcaaaacaatacctaaagcaattggaattaatacaacttgaacaactgaccacaacatactcacgaaagatacttccaaccattcatttgcaaatagatatattaacgcaggtgtaacgaatggcgctagcaacgtagagaccgtcgtaatagaaacagaaagtgctacgttagctttggctaaataactcattacattacttgatgtcccacccggacaacatccaactaatattacgccaacagcaatatcaggtggtaaatgaaaagactttgcaattataaatgctaatgtgggcataatactgaattgtagacagacaccaataattactgctctaggtgctttaaagaccattttgaaatcattaggtgtaattgttaatcccatacctaacataacaataccaagtaaataaggtacccatttacctaatgtcgcaacatgttgtgggaaaataaatccaataacagctgctactaacatccataccaaaaaactcttcgtggcaaatatactcaatttttgaaacattgttaacacatcctcgtcgataatattgaaaaatattaccataagaccagtaaggttacaattacttttctgaaaattaagattatttagtcattctcttcttattgcaaatattttatcactgataaacaattattttaaacttcattcaaaagtcttagtgaataaagaaaaaaagcgtggtaaaatcaacttgaacaaaattaagtcacctttataaatattaaacgtgtatttaatgccatgtattcctcgggaggtcctcacatgttaattgataaattcgaaacatacatcatcaacatcgccggtttaaatgaccgtactactagaaaaaaattaagtaagttatgcaaaagtgtacaattttgtgatgcgttgcaattctcaataaacaaacagtttaatcagtatgtattagaaattagcttaccaaagcaacaacttccatacttcatttcatttttaagttttcatcagtatagtattttccaagtactttcaccaaagaaaataaatgaattacttgattctgataatttatatcaatctgcaaagcgtttcgatatcaatattgatggcttgcaagatgctttcattaaagacaaagtcatcgatattatgaatatgttccaaaatcacactgatatcacttatacgttgaataagtctcatgcacatattatatgtacgccagaaatatttgctaaattgttacatacgattgcaactagaaatatcgacattctatctgccaattatagatcgtcatctatgagcaaagctcgtatatcataataaaagacacatctatacgatgatcatttacaatgattgcgtatagtgatgtgtctttttttgtattatttatcttcggacgattgatcctcaaccatttgttcaaatgcttcacgaacttgtggtactgtcatacctactacaacttggatactcttaccactctttactaatccgtgtgccatttgttgatgcgtgaaatattccgtatctgcaactttactttcatcataaacagttaagcgtaatcttgttgtacagttagtaacatctttgatattttctttgccgcctaaaccgtcgaggtaatatgcagctttgtcttcgtattcattaccagatgaagcacgtttagaatctacgctatcaccttttttatttttgtaatcttgcttagaaaataatttaacttcctcttctgttttcttacgtccaggtaatggaatatcaaatttcaaaattaagaatctgaataagaagaagtaaatcgctacaaatatcagaccgataataacttgtgcaacataagtaccccaatgttctttacctaatggcaaccagtttgttgaaataaagtctaacaagccaccacccatgttacctacaacaccaaatgcgtacattaaagtatccattgatgctgctaaaactgcgtgtaaaacaaataagtatggtgcgatgaataagaatgtaaactctaatggctcagtaatacctacaacgactgctgttaatgtggcaggaataagtagtgccgccacctttttacgattttctttaggtgtcgtagcatacattgctaaagcaatacctaaacatccaaatactttcccatttccttgaagcataaagccataagggaattgctcttttaatggcttagtactcttagcaaactcatttaaatgttgtaaccattcagctttcaagccgtgattgactactactggtccaacttcaattggtgcataaataaagtgatgtaatcctgttggtattaatacacgttctaagaagtgatacaaccatacaccgatatagcctgaagcaatgataaagtgttgcattgaaccaataccgtgctgaacagttggccaaataacacaagtaattgctgctaatggtaacatcacaaaaaatgaaatcgtaactacaaatgttaaaccttggaatacaccaaccatttctggtaatcgtttactatagtatctattgtgaatccaagtaataatagctgaaataataataccacctagaatattcgtatccaatgtggcaatacctgcaattgattttaaaccaggtacattttcaacgcctttttctaaattagcgccaaacgtatgtggccattgtgttaaaatggcatttataaatgtattaaacattaagtaacccatcaatgctgcaagtgctgcatgacctggtgcttttttagctaaagaaagtggtagacctacaacaaatacaacttccatatgcgtaaaaataacccagccaccagattctattactgaccaaaatttaaaccaaaacgtatgttgatctgctaaactccccatgattgtaggatttttaaataatgtcgcaaagccaagcactatcccaaagaaagcgaacattaataccggtacaatcattgcactaccgaaacgctttatcgcattcatcttctattccctccatatcatctttcctaacaatacatctaattagattcatttataaatagatgtcttactatttaaatataatatatagtaaacgcttacacacctacaacgacattgacgtattttgaaagtattttgtataatcagattatcttttcatatagtgaaaattttttcacgaccttatatatgacatcgttgtatttgtaatacattcgttttaaacgcataatcaaacctatatcaatacacaaatatatataatgacatacaagattttaatgtaataacgatctattacacatttattttcaaggaggttgaatatgtttttagatgaacacattaatcgaaactttgataaacttaatgataatgatttacatatcgctcactttatcaatacacatatagatgaatgtaaaaatatgaaaatacaagatttagcgcaattcacacatgcctcgaatgcaaccattcacagatttacacgcaaattaggttttgacggttatagtgattttaaatcgtaccttaaatttgaaagtaataagacacaccaattaccttctaactctatcgatagtttcaaacaagaaatcgatagtacattcagttatttagaacgcgttgattaccagcttcttactaaaaaaatgcatacagcttcaacaatatatttgtatggtacagggcgtgcacagttaaacgttgcttcagaggcacagcgtatattgttaacgttacataatcatgtcattgtacttcatgatgaacatgaacttaaaatgattttgaacaagagtgaacctaatgatttattctttattatttcattatcaggtgaaacacatgaattattagaagtaacaaacttgcttcaacttagacaaaaatactttatttctgttactacaatgaaagataatacccttgctcaaaaagcaaattacaacgtctatgtatccagtaacacattctacttaactgatggtacagactattctagcttcatcagttatcatatattctttgaaacacttgtaagaaaatataatgagtatttactacataatgatatttcaaattagaaaaaaggaagttatgatttaatggccttgagcctatcataacttccttttatcattttattgttgtgttgatgtttcgataacgtggtacatcttatcaaacatcaattcgaaaccatgcaccatggcatcatgatattcttttttcttttgcttgtattctaaattagtaaatcgtctttctttttcaactaatgaacgataataaaatagcatttgggtgccacctgtttcacgttcaaaaaattctacctcaatgacatcttgcgtttcacttagtccaggcataccgatagtcatcttaacgtattcatccataactaaagattcataaatgccttcaatcacatttactttgccattacgttgttgatctacaatacgatatttaccgccttctttaacgtccgcttcaatctctttattcgttctggctgatgtcataaaccattgtttcaacaaatctttctttgtccaagcttcgtatactaactctggagaaaatttataaagcttttcaatttcaacttcgacatgttcattctctacattaaattttgccactgttgtccacccactttcgctcttacttttattttaacgtatttttgctcagttccaaacatagatgatcatcatttttaaaagattagcgttatacggtgagtacaacatgatctgttaatataacaagccaccttacttggctacatcgatatattgttaagcattaatgtttcatttcttgactagtgttcttttttagctttggaaaattaaataaaatcgcaataagtccgcatacacctaataatataggataaatgctgtatgggaataacattaacggtgaaataccagctacaccagccgctgaaatgacttgcgggctatatggtaataaaccttggaagcagcctccaaatatatcaagaatacttgctgatttccttgaatctacatcatattcatctgcaatatttttagctaaaggacctgacataataatagagatggtgttgtttgccgtggcaatatctgcgacacttaccaaactagcaattcctaattctgcgccacgctttgatttcactttagagcgaacaaattgcaacaaccattcaataccaccattgtgttgaataataccgactaaaccaccaattagcaacgcaatcatagcaatatcttccatgcttataatacctttggacactgcatctagtagccccatccaaccgaatgaaccatctatgagaccaatgattccggctaataatgttccgccaatcaatacgataatgacatttacacctaataatgctaataccaatactaagatataaggtacaactttaattagattataatcatagtttttagcatgatttaaagaaatgccattcgttaagaaatacagaataataatcgttaaaatagcacctggcaatacaattttaaagtttactctgaatttatctttcattttcgtatgttgtgttctaaccgcagcaattgttgtatctgaaatcattgatagattatcgccgaacattgcacctccaacaactgtagccattgctagcgcagttggtacatctgtcgcttgtgcaaatccgtaaccaacaggtgctattgcagcaacagttcctacagacgtccccatagatatagaaacaaacatacaaatcacaaacaatcctacaataattaaattttctgggattaatgatagtcctaaattaactgtcgactttacgccacccattttttcagctgtatttgaaaatgcacctgctaaaataaaaatcaacatcattaaaacaatgtttgaatggcctgcacctttcgtgaagacctcaacttttttagcaaatgattcttttcgattcattaataacgccacaattaccgttatcgtaattgcaacatttaatggcattgaagtaaaatcacccgtgataatacctaagcctaaaaacaacgccacaaataataacaaggggaataatgcccaagcattgctctttttatgtacttccatcctttttacctgctttccaattaaaaatacctctttctcacaaacgatgaagaaagaggttttcatgtgctttacctgcttatcttcaaaccattacggttactggaattggcacattcgagatgttgccgaggcttcatagggccagtccctccacctctctagataagtgatgcttatttacgtttacgttacaagataatccttagtacgtcaatcataaattaatcaggagtcgtataatatttttcataaacaatcattgctactgtaataataatcaaaacaataatgctaataacaagtaaaagccaccatttaagcattaatgcaataaaaatgaacacgatagacacacttactaatattaatgatatgactttaaattgctgaacacgttgcttggagatgactttcaactgtttgtttgatagacgcgtattttttatactgattcccagtatattttctaatatttgaaccaatacgatacttattgcaaatataataattggtaaaacatcatagctccctatagttaatgtataaattacaaatccaatgtaaagtaaccctgagacaaaggataaaaagtatgcgacgtatttgttaaacttaatgatatgctttttaacgttttgatgtgtaaaccatacattcgaaacgatcgcaactgctacaaataatgtgaatactatatataatggtaatttttgttcaggaaaaacagtcgctattccaaaagctaatgctaaaatcaaaaataatatagctctagatactattaatgccataataacaacccctttgtttaatatcgagtttgcaaatttacgtttatcagcgtttctatgatcagtacttctacgggtagcgtttctatgtaatttacatcatcttaacatataaatacttcgctatttaattgaaaacatatcctattattctttgtccgttctgacgtttaatatctagccttaggcatttcacttgttaatgaatttaactttcttccactaaccgtccctaaacccaatcccgcaacagtttttaactttttcgttgttgtcctgacatcctcattaagaaagtttattctgcttaaaacttataatccacaccctgagcaaacgctccttatgacagagtattaaaataagccgataaagatacacacctttaccgactatttaaaatacacttcaccaattcattttaatttaatggattgaagtaactaaattaatattatgttgttcaattaaaaacttcatacaaacctaatctatttgcactccaccgctaacaccgaacacttgtccggttgtataacttgattcttctgacgctaatagcacataagttccacataactcaacaggttgacctgcacgacctaaaggtgttttttgaccaaatgttgggattttactttgaggttgtccaccagaaatttgtaatggtgaccagaatggaccaggcgctacacagttcactctaattccttttggtcctaattcttctgaaaaacttttagttaatgaaataattgctgcttttgaagcggcataatcatgaagaataggactaggattataaccttgtacagatgatgtcgttgtaattgacgcacccggttttaaatattccaatgctttttgaactgtccaaaatagcggatagacattcgtttcaaatgtttctgtaaatgcctcagttgtaaatccatgaatatcatcatgatactgttgatgtccagcaactaaagtaacattatctaagccacctaattgttgatatgcttgttcaacaaggtcatagttgaactgttcatctcttatatcaccaggaattaacactgccttttgaccactttcttcaatcacttggcgtacttcttgtgcatcttgttcttcactcggaagatagttaatcgctacatctgcaccttctttagcatacgcaattgctgctgcacgccctattgctgagtcaccacctgtgactaatattttatagccttgtaagcgttgatgaccttggtaagacgtttcgccacaatcgggtgctggcgtcatttcagattgtaaacccggtacctcttgttcttgtttttcataatccgttgttttaaattttgttctaggatcttgagctgccatttttttacatctccttattcgcttaatggttattatttacccaatcttcctaggaacttaatcatgattacactaaaaattactttcttctttataaaaacaagctcgaattattcatgcaatagtctctttacaaattcaacaaaatactcaggtactttttccagaatcctttcatccggtttatattgaggatgatgtaaatcatattcactatgagaaccaattaacgcaaatacacttggaaaatgttgactataacctgaaaaatcttctccaatcgtaagcggctgttccatcatttccaccttatatccaacatgttgggctactgcaattgctttatgcgtcaatgcctcatcattcatcacagcgccaggtaaatgcgtataatttaaattaattttcatattatatgcttgagccaatccgtccgcaatatcttgtaatcgtgtttctacaagctttcgtaccacaggatcaaaactacgcactgtgccttgtacatacgcatgatcagcaatgacattccaagtattaccacatgatatttgtccaattgttactaccgcttcatcaaacgcagatagatttctactaactatggattgaatactattaatcaattgcgccaacacaataactggatcgttgcattgttctggctttgcagcatgaccacccacgcctttaatatgaaactcaaaacgatctactgctgatgtaattgcccctgttttgattgcaaatgtacctaccgaacgcgatgggtcattatgaaaacccaatactgcttgtacatcttttaatgcatgtgtttcaataattttaaaagcgccatgtcctagttcttctgctgattgaaaaatgaatttaacacgcccagtaagagtgccctcaatttcttttaattttacagctgtagccaaaatactagccatgtgaatatcatgaccacacgcatgcataacaccttcattttcagatttaaaatcctgttcaacaagctcttgaatcggtaaagcatcaatgtcagcccgaacagctatacaactcagaccttgtcccacttcagcaacaagcccagtcgcaagtggtaagtctaatattctaatatgatgttctgttaaaatatctttaattttttgtgtagtcttaaattctttatcggatagttctggaaattgatgaaaataccttctccaggtaacagcttgatcttttaatcccatcggtcattccccttccttaagtcaatgatatgttgtctaccctacgatgatcatctttgactattaaacgatgatttcacaacaatgtactcttgttaattgctttcgttaatgatagacagttgtttaataatatcgtaacactgttgtcaaactattctaacttttataattgagactctatacaaaaacgtgttctcgaatatacttgtttttacaaaccacaaaaagctctaaacattagtttaaaccaatgcttagagctttctaattattttatgctttaaaagatactgtgttatctacgatgaccttaccgtctttaataactttttctgcgtgattgataccaaaatgatatggaatatattcatgatttggtgcatcccaaattactaaattagccttatcacctgtgttaattgtacccgcgttaatgtctattgctttagcagcattgaccgtaacagcattccaaacttcattaggtgatagctttaatttcaaggctgcaatcgccataacaagttgtaagttgtttgtgacactactaccagggttataatcagttgctaatgcaatcgcaccgttattgtcaagcatgcctcttgcatctgcataatcttctttacctaaatagaacgtcgttgcaggtaagaggacagctacagtatcactatttcgcaacttttcttttcctttatcactagaagctactaagtggtctgctgatattgcttgttcatcaattgctaattccagtccgcctaacggatcaatttcatccgcatgtattttcactttaaaacctgcttctttggctttttgcatataatgttgcgattgttctattgtaaatacacctgtttcacagaaaatatccgcaaagtctgcatattgttttacttccggaagtaacgcaatcatttcttctaaaaatgcctcatttgaacttgcctctttaggtacagcatgaggccctaggaaagtatgtttcatgtctaaatcatatttctcagctaaacgattagacactttcaattgcttcagttcattttctctatctaatccataaccactcttactttcaactgcaagcacgccgtgtttaatcatagtaagcaaatcatgctctgcttttttaaacaagtcatcttcggatgtttctctagtagcattaacggtagataatatgccaccacccatttctaatatttcaaggtaagacttaccttgacgttttaatgacatctcatgttctcgagatccaccaaatgttaaatgggtatgtgcatctactaatgctggggacactaccttcccactagcatcaatcgtctcagtcgcatcgtagtcatctgtatgtgttccagcatatacaattttgccatctttaatgacaactgtaccatttttcacaacatttaattcatctaattccttacccttcaaaggtttatctgttgatctcggtaaaattaattctgctatatgattaattattaaatcattcattacttatcacctgctttatcaatcattggaatatgaatacctttttctttagctgtttgaatagcgatgtcatagccagcatcaacatgtcgggcaacacccatacctgggtcagtcgtcaatacacgttccaatcttctttcagcacgctctgatccatctgctacaacaaccatacccgcatgaagtgaatatcccatgccaacaccgccaccgtgatggaatgaaatccatgaaccacctgcagctgtgttaatgagtgcattcaatacagcccaatcaccaaccgcgtcactaccatctttcatactttctgtttcacggttaggactagcaactgaaccagcatctaaatggtctcgtccaataacaattggtgctgaaatttcaccgtcacgtacaagacgatttaaagctaagcccattttcgctctttctccatagcctaaccaagcaatacgtgatggtagtccttgatatgaaattttttcttcagctaaatcaagccatcttaataacttttcattttctgggaaaagtttgcgcatttcttcatccgcacgctcgatatcttttggatcaccactcaacgcagcaaagcggaatggccctttaccttcacagaataatggtctaatgtaagctggtacaaagcctgggaagtcaaaagcatttttcactccgttattgaaggctacttgacgaatattgttaccataatcaaatgctacagcgccacgtttttggaattcaagcattaattcaacatgctttgccattgaagcttgtgacagttcaacatattttttcggatctttttcacgcaatactttcgcttcttctacagagtatccttgtggcacatatccatttagcggatcatgtgcacttgtttggtcagtaataatgtcaattttaaatcctttttctagaatcgcttgatggatgtctacagcatttccaactaacccgattgataatccttctccacgttctttcgcctcttctgctaattttaatgcttcatctaaatcagctgttttaacatcacagtatttcgtatcaattcgcttatcaacacgtgtttcatcaacatccacgcaaattgctaccccatgattcatagtaattgctaacggttgcgcaccacccataccacctaaacctgctgtcagtgtaacagtgcctgctaaatctccattaaagtgttgattacctagctcggcaaatgtctcataagtaccttgcacaataccttgagaaccaatatatatccaactaccggctgtcatctgtccatacatgattaaaccttttttatctaattcattaaaatgatcccagtttgcccattcaggcactaatactgaatttgaaattaatacacgtggcgcttcttcatgtgttttaaatacagcaactggctttcctgattgtactaacattgtctcatctgattctaattctcgtaacgttttctctattgcttcaaaagcttcccaattacgtgctgcttttccaataccaccataaacaactaaatcttctggtctttcagcaacttctgggtctaaattgttgtataacattctaagtactgcttcttgttcccaacctttacactcaatactcaaacctttttttgcttgaatttttctcataaaattcgctcctgttcttttaagaagttaattccactaaatttaaaacgcttacattattatcttcaatattcattatagtatgttaaaatatagccaacaaatataaataaactaattatccatagcttgaatctataaataaaaggagcaaaacacatgaaaattattcagttagaatacttcttggctatcgtgaaatataatagttttactaaagctgcacaatttttacatattagccagccatctttaactgctacgattaaaaaaatggaagcagatttaggttatgacttatttacacgttcaacaaaagacatcaagattaccgaaaaaggaatacagttttatcgttatgcgagcgaattagttcaacaatatcgatccacgatggaaaaaatgtatgatttaagcgttacatcagaaccaaggataaaaattgggactcttgaatctacgaatcaatggattgcgaatttaattcgaaagcaccattccgactaccctgaacagcaatatcgtttatatgaaatacatgataaacatcaatctatagagcaattactgaattttaatattcatttagctataacaaatgaaaaaataacccacgaagatataagatccattcctttatatgaggaatcttacattttattagcacccaaggaaacatttaaaaatcaaaattgggtagatgttgaaaatttgccactcatattaccaaacaaaaactctcaagtgcgcaaacacttagatgactattttaatagaagaaatattcgtccaaatgtcgttgtagaaacagatcgattcgaatcagcagttggatttgttcatctcggcttaggttacgctatcattccgagattttattaccaatcatttcacacgtctaatttagaatataaaaaaattcgtccaaacttaggccgaaaaatttatatcaattaccataaaaaacgcaaacactccgaacaagtacatacattcgtacaacaatgccaagattatttatatggacttttagaggctctttaacttaagttattagagcctcttatgcagttgcgcagatcatcgtataaaaattaatgacgtcatttcaaaaatcgatacaaaaataatttattataaaaattctaagaaagaagtgaagcagatgttaaaatctattaatcatatatgcttttcagtcagaaatttaaacgattcaatacatttttatagagatattttacttgggaaattgctattgactggtaaaaaaactgcttattttgagcttgcaggcctatggattgctttaaatgaagaaaaagatataccacgtaatgaaattcacttttcatatacacatatagctttcactatagatgacagcgaatttaaatattggcatcagaggttaaaagataataacgtgaatattttagaaggaagagttagagatattagagatagacaatcaatttactttaccgaccctgatggtcataagctagaattacatactggcacacttgagaacagattaaattattataaagaggctaaaccacatatgacattttacaaataaggtgtcattataaaaaggcctcttgaactccgttaaaattttaattaattattatataataagagaacttttcaaacaatacagttgttatttttgctatttcaacaaacataaataagcagtaagatgactacaacttaagagtcttcttactgcaattatttttcaaatatatcaacgttaatataacttctattaagaaatactcacattctgccctgcaatgcaaatctcgtcacatataaatatttttaattattttaaaaaatgatgcactaaattagcaacgagcttagcagttctattgtcagcgtcatatgttggattcatctcagcaatactaactgaagacaccttatcacttggaataatacgttttgctaattcaagaacagtatgtggatacaaacctaacactgccggcgcacttaccccaggcgcaaacgcactatcaatgacatccatacaaatcgtaaacataatgacatcatgttcatgtacaaaacgttcaatcatatctttaattgttggtgatacgtgactcaataattcatctgcaaagacataatcaatctttttctctttagcataatcaaataaactttgcgtattaccaccttgagcaataccaagcactaaataatctgtgttttcatcttcttctaaaatttgtctaaagctcgttccagatgtagattgttgttcagcacgtgtatcaaaatgcgcatcaatatttatcacaccaatagattgtgttggatagactttacgtgttgctaaatattgagcatacgcaatatcatgtccaccacctaataaaaatgtttgtctatgattagcaattgacttcgctgcaagcatagcaaattctttttgagtatcaattaattcctcatgatcatgataaacatttccgtaatcgactaaagtttcacattgattcaaatccggcaaacctgcaaatgcttgtttaatcgcatctggtccttcttttgcaccaatgcgccccttgtttaaagcaacacctttgtcaacagcatagcctaatataccgacccctgatggcatactactcttttccagcttagacaaatcttcaaatgttactgtttgaaaatgtctaaattttttcgggtctgtttcactatctaaccttccagtccataaatttggttcaccttgcttgtacacagcatttccccctcttatttatgtggcttattaacaattaaagtataacgtataggaaattttgaattcaattcatagttaaatccgtatcttaaaaatacttatctacattacttttacccctattttctatgtaataacgaatacttagctgatttatgttaataaaatacgtcaagactattacattttcattaatattgacatagacaatttatctctcggcttgtaatatgtataattgttactaaaagatattttgcttgttacctaatggaggttacatataatgaagaacaataaaatttctggttttcaatgggcaatgacgattttcgtcttctttgtcattacaatggcgttatccattatgctcagagatttccagtctataattggtgtcaaacactttatatttgaagttacagatctagcaccattaattgctgcaatcatttgtatactcgttttcaaatataaaaaggtccaacttgcaggtttaaaattctcaatcagcctgaaagtaattgaacgtctattgctagctttaattttacctttaattattctaattattggtatgtacagctttaatacatttgcagatagctttattttattacaatcaacaggcttatcagtacctattacacacattctgattggacatattctgatggcgttcgtagtagaattcggattccgttcatacttacaaaatattgttgaaacgaaaatgaacacgttctttgcaagtattgttgttggtttgatgtattcagttttctcagcaaatacaacttatggtacagaatttgctgcttataacttcctttatacattctcattctctatgattcttggtgaattaattagagcgactaaaggacgtacaatttatattgcaacgacattccatgcttcaatgacattcggacttattttcttgtttagcgaagaaatcggcgatctattttcaatcaaagtcatcgccatttcaacagcaatcgttgcagtaggatacattggtttaagcttaattatccgaggtattgcatatttaacaacaagacgaaaccttgaagaacttgagcctaataattatttagaccatgtcaatgacgatgaagaaactaatcatactgaggctgaaaaatcttcttcaaatattaaagatgctgaaaaaacaggtgtagctactgcatcaacggttggtgttgctaaaaatgatactgaaaatacagtggctgacgaaccaagcattcatgaaggtactgaaaaaacagacctcaacatcacataggtaatcaaactgaatctaatcatgatgaagatcatgacatcacttcggagtcagtagaatcagcagaatcagttaaacaagcaccacaaagtgacgatttaacaaacgattcaaatgaagatgaaatagagcaatcattaaaagaacctgcgacttataaagaagacagacgttcatcagttgtaattgatgcagaaaaacatatcgaaaaaactgaagaacaatcttcagataaaaacaaataataacaaagcgcttgctagtacctcttaaaaagatgatgctagcaagcgcttttctatactatatattatttttctaaaattttaacaccctcttgagtgcctacaataacttgatctgccatatctaagaagtatcctgtctcaaacacacctgtcagatgaattaaatactcatggaacttatatgggtcaattccttttggtaacttacaatctaaaatataattgccattatcagttataaatgcgacatcttcgtttacacgacgttctacttttatatcagcgtatgattcaattttacgtaatatgtgataccagttaaatttatccacctctactggtaacttaaacgtctcacctaagtattgaactattttcgtttcatcgacaaccacaacaaaacgcgatgccatttcatctataactttctctctgaacagcgcaccaccgccacctttaattatatttaaagatggatctacttcatcagcaccatcaattgctaagtcgatatgatcaacatcattgatttcacatattttaatacctaattcttttgctaaaaatgcaattttattagaagtgcatacacctgtaatattgtaaccacgttctttaattagttgcgccatttgaggtaagagtaattccattgtacttcctgtaccaattcccagcgtcatgtcaccattgatttgacttaaaacatcatttaatgtcattaacttgagtgctttgacatctttcatgaaggtagcctcccatatttatgtaatctattcaattcatattttacatgactcgtataaattaacatacccttatttctaacatttttttaaacatatcaatcagaatttacaattctaaaaatgttttatagtacaatatattttaaataatactcgttaaggagaatgatatgatatcaattcacgcaatttcgacaggaaaaatccaagatttgccttatagctcgaaaagaccgatgcgctctgctttagataaaactaagatttcacaaacaacatggttatcttcaactggtttcactggtgatgaacaggcttataaagatcatggtggaccacataaagcagtttgtgggtttagtaagcataattatgcactgtatcaagatgatttacctacactacctactcatgcgatgtttggagagaatttaacatttgattatttagacgaatctgatgtttactttggtaatcaatatcgtttaggtgaagcgttaattgaggtttctgaaattagagaaccatgctggaaaattcaagcaaaatataatattcctgatttagtgaagcgcatgtctacatctggtaaaacaggtttctatttccgggtattaaaacaaggctatgtatctccaaatgatcagctttacttaatacaagaagcaccaatcgaacatcgtttatctgtacaacagcttaatgacctttattataatgatagacaaaatcaagatatgttacgatatgcactaaacaatccatttctgtcaccaacaagacgcgataaacttcaaaaaatgtataacagaacattgaaataattacctttcattataagtgttaaatgaacttttcaaaacaaaaaggaatcaacttacacatcgtttgtataatagtcttatctataaccactgatgctattgattccttttttatgttatatattttctttatttcaaactgtatattaatgatgtcacttcatttgatacgattcttgataacctattcaaaattccgccaaataacataaatattatataaatgccgatacttttaatcattttctactttttcttcgatacggaaacttgttttcgaattgaacacttcaccagcttttaaaattgacggtgctttttcaccatataaattaatatcatttggtaaaaattgtgtttctaatgtaaagccagaatgtggtttataaatattaaatggactatcccactcatcaggctggttaaaagtaaagaacacaacatgaggcatatctgtatcgacctctaacataaattcatgattttcaacatacattttatgttcaccaactgtaaatgggtgatcgagaccaccaaaacgtgtcatttgttggcttaattgcgcatgttgtgatgtaaaaatatcactcaattttatcttgttatcttcaaacacttcatgtaaatctagaatatcacctgtaacaatatttcgctcatctaatacatacatatctaattgattacttgaaatgcgatgattatcaacgacattattatctcgattcaaattgaagtacacatgattcgtaggactaaacaatgtgtcttctgatgcaactgcttcgtattcaatcgaccattggtgatccgcatcataaatatgtgtaatcgtcacatcgatatcacccgggaaatgatcatcagctgatttcaacaccgtcttaaatataactttaatttgagcaatttcatttctaatttcataatcaaataacttattgtccaaaccatgacatccaccatgtaaatgatgttcaccgttgtttttttctaactgatattctttacctttcaacttaaatttagcattatcaattctaccgctatatcttcctatagaagcaccaaatttaaaaggattactatgataaaattcatccgcttcaacaacatttccaagaacaatattattatcatgatatttccaagacactactcttgctccataattcgtaaaaataattttagtttcatcattatcaattttgattaaatctacaccttgtctttggtgctcaacttcaactatcatttttacttctcccttctaaccacaagtgttcaagctctgctgggtagcaacattactaaaacacctacaatacaaatgattgcaccgataacatcatatttatctggcatttgtttatctacgaccatcgcaaaaatcaaactcatgatgataaatacgccaccatatgctgcatatactcttccgaatgatggaaatgattgaaatgtcgcaatgacaccatataacatgagtatcgcaccgcctattagcccaacaagtgaagactgtccttccctaagccacagccaaatcaggtatcccccacctatttcacataagccagctaatataaatataaaaatcggatataacatgaaatcactccatcacacatttgctatcaataatctatcggctacatatcatttgtttacatttcttcttacttcacattcccattttaaaaagttcgttttcacattcatattgtacacttttttagacattattctatagctaaatataaaaaaataagagtaacacgctttcatcatcattttatatgataaatgtgtgtcactctcatcaattttattttttaaatacacgtttcattgaattaaataagccacgttcaaatgtaagtactgaatctttatatgttttaattgcaatccatatcaagacagctaccattacaattgagattaaagaacttaagatgacctcatatatttgaagccctgaagtttgagcgcgtacaactaattgaaatggcgctaaaaacggaatataacttgtgattaaagcaagttgtccatcaggattatttatcgtgaatatcgcgatataaaatgcaatcataccaagtaatgtcagtggcatcaaagattgatttaaatcttctattctagatgttaatgatccgaggatggctgcaagtaatacatacgccgtaattccaacaatactacttataattccgacaataataatttgccaagacaattgattcatttccacgttaaaaccttgtagcaagtcttttaagtcaaaggcaaaaatgcatataactgccatcaatacaattaaaataatctgagtcacggcaactgctataacgcctaaaattttagcaaaaatatgttggattggtgaaatacttgtaataatcatttcaatgacacgcgatgttttctcactagcaatttccatagctatttgagatgcataatttaaaacaatgaagaacattagaaagataatgccataagctaaagcatagttgaaaatcttttgtccttctgatactttatcgacttcatcattagaaatcaccttattatcaactttactttgtgcttgtaatttttgtaagtcttctttgttgatatttaattccccggctaccatatttgtttgaatagctgtaagcagtgcttgtactttttgtgaatcttcatgacttactcgcttctcactaatgattgtcccttgtaacgtgcgattttgattcaccttgataatataagctttatcaagtttatgtttttttacttctttttcagcatcttctatagaaactttagtaaacttagcatcactatgaaatgtattcgcctgttgcttgaaaaccttatagatttgttcattcggtgctgctacaccaattttatctggaccatcatcaaacatgttaataatcttatcaatgttagataggccaatcattaaggcagcaataataatcataaaaattacaaatgatttagctttaatttttttgatatatgtcaaagtaaatgtcgcccaaaacttatgcatccttgccaccaaccttctcaatgaatatatcttgtaatgatggttctacaacttggaatcgtttaacataaccttgatgtgccacaacttgataaatatctttggctacgtcttcattctcaatcgtcaactgaagaccttgcttcatgttttcactatgaatgatgcctctaatgtttgttaaatctggtagtgttgtttctgattcaatgacaactttcttgttaccattagatgcacgtacatgattgatatcaccagaaacaacaagttgacctttatctaaaatacaaacatcatcacataattcttcaacatgctccatacggtgagaactataaacgattgtactgccccaatcatttaagtctttaactgcttcttttaataactcaacattaactgggtctagaccactgaaaggctcatctaatattagtaattctggtttatgtaacatacttgctaacagctgaattttttgttgattcccttttgatagactatcaattcgttttttgcggttttcagtaatatcaaaacgctcaagccaatacgatatttgctgttgtatttctgtttttgacattccctttaaagttgccaaatatttcaattcttcttcaactgtcaatttcccatgtaaaccgcgttcttccggtaaataaccaatacgattgtacattgttttatctagttttttaccgttatacgtaatgtgtccttcagttggttcacttaagcctaaaatcatacgaaatgtcgttgttttacctgcaccatttcttcctagaaaacctaacattttacctgattctaactttaatgaaatatcatttactgccgtcatcttgccaaaacgtttcgtaacatgttcaattacaagtcccatactttgcctcctaaaaaaatatgtatttatcttaatataacatttccattctctataaatgcaatatttttaaaatgaatttatttttaaaatttctgaaattgaaaaatttaaatagtgccatttttgcatgttaagtatcattagcactagatatgttttttccatgcctttattgccttatttgtaaaaaaatatcccagcatcattgtgccgagatatttatatcattacaattgattatctgtttcttccggtgttttcggtgtttcagatgtacacgctttttccggtgtttcagatgtcactggttgatttttaattgtagacgggtattttgggctttcgccatatttatttgccggcttactgtcaaagcataggaatactatcataacaattgttaggcctaaataaacaaaataaagaagtactaacaaaatattaagacccatcggcattaatgtaaaatcactgtcataataactatcgataatctgtaatactatataaaatataatactgaatactgtcataatcattggaaataacattgttcttgatatatcgtgaaatcttcgaacgcacaacgctaaatttggaataaacgttgccaaactatagacaaaagtatacacagatgtaaggataatcatcaatatactcataactattaatgtttcgttatccgccgctatagaaataaagaatagaaataggtttattattagcacacacacagctggaaccataagtatcaaatgccatagtgccatataccaatattcactacgtcttgatctccccttaaaatttacataatttttccaaaataaaacgaatgatttcataaaacctacttgaggtaattgttccattgtaatctccctttcgttaatcatatttatatttttaattattgttaccgttataatttacaagattcattatcaagccacttcatttcaatcgtcaatcactttggaaaatgaactttatatttcatcactagtaaaatgaaaacccgctacaagtacacatctatatggagactcatttgaaagtcaacgcttcgttaactatactaaaaatatgtcatactgcaatgttcacgtttaaaagagtctcaatctatgcaaataaaatattccataacaaagtatatactttacatttttataattcttaacaatactattttatcaaacatttaccacaataaaaatatctttttcatttttatttaaattaatcatataattgcgaggagaatattatggatttcgttaataatgatacaagacaaattgctaaaaacttattaggtgtcaaagtgatttatcaggataccactcaaacgtatacaggctacatcgtggaaacggaagcttacttaggtttgaatgatcgtgcggctcatggctatggcggtaaaataacacctaaagtcacgtcattatataaacgtggtggtacaatttatgcacatgtcatgcatacgcatttactcattaattttgtaacaaaatctgaaggtatacctgaaggcgtacttatccgcgcaattgaaccagaagaaggtttatccgctatgttccgtaacagaggtaagaaaggctacgaggtaacgaatggcccaggaaaatggactaaggcatttaacattccacgggctatcgatggcgctacgttaaatgactgtagattgtctattgatactaagaatcgtaaatatcctaaagatattattgctagtccacgaatcggtattccaaataaaggtgattggacacataaatctttacgttacacagtgaaaggtaatccatttgtgtctcgcatgcgtaaatcagattgtatgtttcccgaagatacttggaaataaatgccatctttcattgattactatcatgaaaatgaaatctatctccttataagtcaatcaatcgtgccgtcaacatgcggatgggttgattgtttttctttgtatccatcatattttttgattcatctcctcttattgaacttgttcttaattataaaatataacaatagaattatttataattattaaatttagatgcattaatattattgatattattttcaaaaactagaaatattgatttgttgcatgtataatgttaaaagcgcccttttataacgcttacatataaaagcttatttagggagagggatattcaacaagggggatttgaaaatgatagaacttaatgcaattacaacattatgtttagcttgtatcctttatttacttggtaaggctatcgttaatcacgttaattttttaaaacgtatttgtataccagcaccagtgattggcggcttaatctttgctattttagttgcggctttggattcatttggcatggttaagattaaattagatgcttcattcattcaagatttcttcatgttagcattctttacgacaatcggtcttggtgcatcattgaaattatttaaattaggtggcaaagtcttgctattatactttatgttttgtgctatcatttcagtcattcaaaacatagttggtgtatcactagcaaaagtattaaatattaaacctttgttaggattaacagcaggttccatgtctatggaaggcggtcatggtaatgctgctgcttatggtaagacaattcaagatttaggtattgattcggcactgacagcggctcttgcagctgcaactttaggtcttgtatttggagggcttatcggtggtccagttgtaaaatttttaatcaaacgttataacttaaagcctcaacatagtgacgatacatttaaagattatagccaagtagcatataacgaacatttacatagtaaatttaatgccactgaagtattcttcattcaatttacaatcgttgtattctgtatggcagttggaagttatttcagtcatttgtttacagctcaaacagggattaatgttccaatttacgttggctcattatttgtagctgttattgtccgaaatatctctgaaagttttaattttaatattgtagatttaaaaattactaatcaaattggcgatgtcgcattaggtattttcttatctcttgcgctaatgagcattcaattaatcgaaatttataaacttgctatacctcttattattatcgttttagttcaagttgtcgttatgattttatttgctgttttaattttatttagaggtttaggaaaagattatgatgctgcagtaatggtaggtggttttatcggtcatgggcttggtgcaacgccaaatgccatggcaaatttagatgttattactaaaaaatatggaaactcacctaaagcatatttagttgtacctattgttggtgcattcttaatcgatttaattggtgttatagtcattatgggattcatacaatggtttagttaaacaccaaactcataaataaaagaggaggccttcgcctcctcttttatttatcctcgatgtatattcaagttacgttgttctatccatgacaatatttccggactaaatacgatttgtttttgtgttaagtcgtcaatatttttagcatctaacatcgtcattattgatttcatgtgttcaataaatgattctacataagctactgtatgtgcaatgccattattttcaacttgatttaaaaacggacgtgacataccagttgcctttgcaccaagtgctaaacttttaattgcatcgagtggtgtacgtaaaccaccactcgcgaaaactgaaatttcgctttgataagccgttgtttcaagtaatgactcaactgtagactgtccccatgatgataagtaatccatatctttatttgcacgacgttcattttcaatatctacaaagttagtaccacctttgccactaacatcgacatacttgacgcctatttgttgtaagtcatgcattaattctttgctcataccaaatccaacttcttttataatgactggaacagacactcgtgatacaatcgacgctatattatctaaccaagtcacaaattcacgattcccttcaggcataactaattcttgaggagaattaacatggatttgtaacgcttgtgcctcaagtaattcaactgcttccaaagccttttctactggtacgtccgcaccaacattgctaaaaatcatgccttcaggattcatttttcgcgcaatcgtaaacgtctcagccatgcgtggatttctcaatgccgcatgtgttgatccaactgccatcgctaagccagtttctcttgcaactacagctagcttttcattgatgtttttcgtccactcgctaccacccgtcattgcattaatataaaccggatatgccatcgttaagtcaggcgtctgtgatgtcaaatcgatatcatttacattaattgatgggatagaatgatgcacaaaacgcatcttatcaaaatctgaatgcattgcgtcagattgggccattgctatttcaacatgttcattttttctctgttctctttgaaaatcactcatgattaaacctaccttttcgtcatttctaatttaaaaccattttttacgtctgaaaaagatgattaatacgacagctataacaaacattacagctaagcaaatataatatccataatgtaaatgtaatgccggcatatttacaaagttcataccataaatcccagctatgaatgttaacggtgaaaatataactgatactaatgtcagtacttgcataatactattcattctaaatgacgtgtatgactcaaaattttctcgtatttcgtttgtcatttcttgagcagtacgaatgatattacgttgcttaatcaagtggtcatcgatatgttgaatgtatagcgaatgtttattatctataatcaaatcaccattttgtttcattgtatcaattagctcttgcataggaaacagtacacgttttactttaatcaaatccgaacgtaacttaaagacactatccatgaccattttattaaagcgatcatctacatggcggtcttcaaaatgataaacactatcttcaagtgcatatacaaagttgaaatatttatcaaccatcatatctaaaattaatatgacgacatctgcacaatctaattctgcatctaatgtattcatatacttatagactactttatttaatgattccaacgtttgatgatgatatgttactaatacattgtcttgtataaaaatatttagtgctattggtgaatagtttgaccccataatactatggaatactaagtattgataatctttataagatttatatttagctcgtggcataccgttaattgcatcatccacttctaaatcattaaaattaaaatgtgctttaaaccattcattttcttgttcattcggttcatcaaaatcataccaaacaatagtcgcatcttttggtatctctttgatatcatcaactactttaaacggttcatatgtagtttgataccgtatctttaaagccatcgatactccccctaaataacgaattctctattattttatcatgaattaaataacgtgtatgtcttaatttattttagtatgatagtcactaaggagatggttattatcaaacaactttttacacatactcaaaccgtaacatctgaattcattgaccataacaatcatatgcatgatgcaaattataatatcatttttagtgacgtcgtgaatcgttttaattacagccacggtctttctttaaaagaacgcgaaaatttagcatatacgctatttacactagaagaacatacgacatacctctcagaattgtctcttggcgatgtatttactgttactttatatatttatgattacgattataagcggttgcatttatttttaacattaactaaagaagatggtacactagcatcaacaaatgaagtaatgatgatgggaattaatcagcacacacgtcgttctgatgcttttcctgaatcattttcaacacaaatagcacactattataaaaatcaatcaactatcacttggcctgaacaattaggacataaaatagcaattccacacaaaggagcattaaaatgacagatgcattacaacaaaagattcatatcgaattactagatttattagatgatgttaagtttgaattaacagaattaaatgcacaaaaagggttatacattaacggaccagcaaatcagctacttaagcgtggcgtgcatatggcttatgttcaaggacaaaagcaagccatcgataatattatgactattgtggaacaacagcttgaagatcaacatttcctagaacattatgataaatttcaaaatgaggttgctcatcgcaattatgataaaacagctaactttgcagaacttagtgatattccacgtcaattcgataattttttagatcaattttatcaaattaaagggcaatactttatcatcacacatatcaatacacttattggtgattttcactcagaagctcattaacaattagtctatataacccttgctatattttcaaaaacaaaacccaattacgttttcatgtcaaatatcatcttgcatgaaatcgtaactgggtcatttatatgttattagttattttgtgttacatcctcatctatcgatttggcaatttgtttaatagctttatgtgattgtctaattggataaattggaaaatcatgtaccatcttaggataatcataaaactcaatgtattgatgatgttgcaacatcatttgttcaaatagcttcatatcaggatgtgtcatttcacgtccaccaccaaacatataaactggtggcaatccttctattgtgccattaattggcgatatgcgcttatctgttaatggtaggccattcgcccattttttcataatctcattgacaccaaactgacttagaaccgcatcttgttcgattaaggcgtccgaaatatctttattagatagtgttgcatctaaaattggtgagattaaatacaatttattcggtaatggctgttgattatctaaaagagattgtacaaaggataatgccagtgcaccacctgaaccatcacccatgactacgacattttgatgtcctacttcagatactaattgatcataaacacgttgtatcgcttggaaagtatcgtcaatatgaaactctggtgtctttggatagataggcagtacaacctcatataatgtacttaaagtgattttatccaacaatctccaatggaacggtgatggttgtagtgcattgaatccaccgtgaatatataaaattttcttatcaatttgatgtctgaaattaaagcgaaagacttgcatatcatctaatgacaatttttctaaatttgctttaacatttaatgttgaaggctgcttatgtttttttctattttcaatttctcttttataaaaaaatctttcaacatcttgatcatttttaaacataatcgagcgattgtgaagcaaatatttattgacaacgctattcataacacggtttctaatcaatgtcttaacctacctttatatattttatgtatccaatgattgtctatcccctacattctttgccaaaaaaagtatataatgtagaagatattttctttttcactttcaaatttaagactacaattgaacagtgatttttcatcattataacagacaactagacatattgataagtaaagaaaagaactttatacggaggtaccttgcatgacaaatccaaatcaacgattagaaccatttgatgagacatttcaacaaccgaatattcatcgtggtaagcgatatggtaagaaaaaacgttcattggtaagcatgattattcaaatcattgttgttatattaaccgcaatcgctggatacagcatgtggaaacaacccatttttaatattgtcttcaccaaagaatctgtagattttgatggcattaaaaattttaacgagacaattggaaaaatgcatcaattaaatattaatttgggtaatatcaatgatttacaacaaggaatcgatcgcttaattttagtctttaacggtttctttattttatgtatcgttagcctagtcataacaatactgacaattgtatttaatcgcacagttctaaaagtagtaaatattttagtgttaacaattatgttagtcattacattgtatttcagttatattattaaagcactcgcacaagaaattgcagatgttttcaaaaaatattatttaaatgtaccaccagatcaagtgattacagaagctgacgctattcataacggcatcattttacttggctgtagcatcggtttacttgttataagcttattcttccgtaatcgcatgcctcgtttaaaataatgttatatagtagggattgggacagaaatgttattttcacaaaattcatttcgttgacccacttcctgctttttctttattaatgacctactacgtcaatgccaaattttaatataattcctctaacattctataaatcaacaaataaaaaaagtatcgataaccatatttggcaccgatactttaaaaatcatgtccccacaacataatttttgattagtcacacttcaattaatttattttatttattcatgattgatactattatctgcatctaacttttgagctgtagcttttgcttttttattactttgtaaaaataaacataaaattaaggcgatgatgctaaatatcgttgcaactataaatgcatcattaataccttcaaccgttgctagtttatttacaaattgtagtaacactttcattgcgccttcttgtccgccatattgtgatgctaattcacgcatatgatcttgtacaacaggattcgttttatctaactcttccccaaaagctgataagtgttgtgtagtttgtgttgtcattacagtaactaagattgctgtacctatagagcctgctaattgacgcatcgtatttaagaaagcattaccatgagaggcaagtcgtcccggtaacgcattaatagctgcagttaccattggcatcattataaatgccataccaaatgaacgaagtacatagatacccatgattgtcatatatggtgtatccatatttaatttagttaattcccatgttgcataagtcattacagcaataccaaagatagctaatggttttaaaccaatagtatctaacaatttacctgcaaatggtcctagtagacccataattagagaaccaggtaataataacaatccggaatctaatgctgagaatccgcgtaaattttgtaaataaatcggtaataaaatcataccaccatataaacttaacattacaaccatattaataattgttgttaatgtaaatgttgggaatttcaatacttctaaattcaacattggtgatttcattcttaattctctaataacgaatagaataataaagataataccaatcgcaaacattgtttctatctctactgaaccccaacctttgttgccagcttctgagaaaccatataacaaagcaccaaaaccaatcgtactaaaaatgatacctgggatatcagctttagggtttgttgtatattgatataacttaaaccatacaaaaccaattaaaatagcgataatcccgataatgaacataccgtaaaacatcacattccaatggtaattttgtacaatataacctgataatgttggaccaattgcaggtgctaaaatcattgcgatacccattgtacccatggcagcaccacgtttttcaggtggataaattgtaataataacaattgaacctaatggcattagtacacctgcaccaatggcttgtaatacacgtccaaccatcatgattgggaaattcattgaaatcgcacagattaatgaaccaattgtaaagagtactaacgcaactaaaaataattttcgatatgaatatttattaaatagatacgccgtaattggtattaaaataccgtttactaacatgaatcccgtcatcaaccattgccctgttgacgcagaaatattaaattccgtattaatttttggtaaagcaacatttaataatgtttggtttaaaatcgcaataaacataccgaataataatgccgctaatattttaccgcgtgaaacaccttcaccaaaaataaagtttttatgttctttttttattttttcattcactttatattcttctgattcaggatttttagcagcaactgcttcctcatccttattattagtgaatgcttcttgatctttctcagacccctttgtgtaaccatttagactaacttggctatgatcatcttgattgtcaacacgcaactcttcatgcgtcatacgttgtgtcgattgatcagttgttttgtctaaatcactagctttaaatttagattgatttgattgacgtgtcgtaaattgttgttccttttgttggcgtttgcctttttttcttgatcttattaaaaataaattgataaccccaacaataatgagcgctaaaataatgtagctaataatgaaggtcgtagtcatttaatgacccccttaatttttatggatttttacttcagcgttcattccaggaacaacttgtttagacggttctgattctagagtgattttaacaggtattacttgagaaactttagtgtagttaccatcactatttgatgatggcattaatgaaaagcttgcagcagttgcttttccaatactatcaactttacctttaatagaagctttttgaccgtcaatagtcacatcaacatctttacctacttcaacatctttaatatctttttcgtcaatatttgctgttacatataaatcatctaaattgtatgcataagcgattgggttaccagcttgcaccattgaaccttccataccatctaatttggcaattgtacctttttgaggcattttaagatccatatctttcgtttcgccatcttgaccttgtacagtaacaattgctactttgtcacctttatcgagtttgtcaccttgtttaacattaagtgatttaatttgtccagatgcaggacttgctattttaatttgatcgccatttacttttgcattatcagttgttacatagcttgttgttttattccaaaaataaaagccagcaatcccaattgctaacagtacaacaaccgtaatgacattaattaatatcatctttttcatgaaacatttcctcctatttgcttttaaaattcactttatttattatagagacatgataactaaaaaaacaccaacaatttttataagagtgttggttaaaattcacaaaggtgtaacaatatgaaacgacaagccaaaatagaaattcaaaacgcacttgttgatttgatggctgaatatccttttcaagaaatatccactaaaatgatttgcgcgtattgtaatattaatcgttctactttttatgattattacaaagataaatttgatttattggataccatcaactcaaagcataaggaaaaattccaatttcttctaagcgcgctacatcataatttcgaaaatattaaacaggataagcttaaactttataaattcttcattattattgctaagtatatcaagcacaatgagcagtttttcaaagacattttagttacctatccaatgaaaacattattcatagactatataaatttagcgagagattactatcaacaaattatgaatgactatagtactacagtaaccaataaacagctttatgttacatatatcataggcggtcaagctggggtgtttattaattggctttcgaatggttgtaatgaatcacctgaagaagttgctgacattttattggctaatacgattaaacttcaaaactaataatacggtttcattctaataaagaaatgctataaaacaactagataaagttaaaccaaatggatagataatagtacatatgtaacggtgctatcaatataaaaatgccgagatttccacataataatctcggcatttttatttttgatgctaaattcataggtctatgaatagctcaagttttgttttttaatttttcaattcaatataatagaagaaactatgtttatcatcgatttgttttaaataccttcatattataaatctgtaaaataattaatataactgctgtagctataataataattatgtaaggtataggattatcttcaccttttacccccactaatggcgatgcaacaccaccaaataaaaactgtactaaacctaataaacttgatgaactccctctaccactactactttcatccatagctattgtaaaaccaagtgtcgcaacacctgtcactggtgctattaaaatgataaatcctatcgctaaaatccaaaagttccaatgattaagcaatacaatcgtcactaaaattacaccgataatctgaatcatcgtcatgcctctcatcaatttttgtgagtctataaaatcaacaaggtacccagtaagttgacttgatataatgagcgtaataccaattcctgcaaacatccaactaaattgtattgcagtcatgccataaattttttgaataataaacggagacgcagaaatataagtaaataatattacaaatgtcataccttgaatgagcattggtaatacaaaacgtggcgtcttcaataatattttgaagtttttaaacattgtctttaatccactacttgactcacgatttgtcactgttaatgattcaggtacttttaataaagaacctatgaccatgacgaagccaaagatagtcagaatgacaaagaccatacgccagacagaataatttaaaattatgccccctattgttggcgcaacaactggtgcaataccattaacaagcatcaataatgccataaacttagttagttcattaccactatacatatcacttgctatagctcttgaaataactgctgctgcgccacctgtcactccttgaagaaatcttaatgcaaccatcagccaaatattatgtacaaaaacaatacctaaacttgctaatgtaaaaataatcatagctataataagcggctttctgcgcccagttgaatctgaaattggaccagcaaacaaattaccaaacgctaaaccaatcataaacatcgataatgttaattgtgcgttagacgtcgttgtttgaaaatcatgtctaatatctggtaatccaggcaaaaacatatctatcgataatgctccaatggccgtcaaagatcctaaaataataataaatatcggtgaacgcttgttaaaatgcgttaaatcattcatatgactatctcctttatataatgattagtttataactatcacgaacagaaactaaatttaaatatgctcttttatatattagcattagtcacaagtttcatgaacatcattacaacttataaaaggtataaaatgatataaacctcagcacttcataaatttttccacaaaaaacaatcccttcaaagtaattcacactaattgtaaatactttgaaaggatgttgtttgtattccatgacacatgcatcttatttaagttttatactctatttttctgatgtcttgattaattgcaagcggtcttgcgagccttgttcaagctcatattctttatctacttgcttaccgttttcatttattaatcttacggttgcggtaatcttatcaccatgtttttcagcatctataatttgtggtgaactaatcatcattaaacttcctttagatacacgcttctttacatcatcataaaaagatgatcctttttttatatatgatgatacaaaatcaaaatccgactgattaaacgcagcattattcgctaaagaatatccagcaaagaattctatcaatttgttcttcaagctgttttcttctttttctttcttttcaacatagtcttcgatatcttcactgtcaaaattcaaagttatctctgtattgtattttaaatcgctagctttaatcgtcttcgtctgtgttgtaaatgttttatctttcgctttacctgaagctgaaatggtaatatctttattttgtggatatggaccatacgttttggaacttgaaaatgccatttcatggtcatttatagttacttttttagaactatcatttaattttgtatcgccttttaaagttacagatatatttgcttcttcaaaatcttcagtaacatctaccgtttcagaattactttgtctaaaatcaaattttaaatggcctgcaaaatcaccgttctcagttgatttcatagctggaattctatatgtccccggtataaaattacctattggcgtcactttatttgcttcagctataaccatctttttcttaccaccagatttaaactcatattttgttttttctttcggtttaacaattggttgcttggtaggtgcagtaaagctcatattatcgaaaaagatataacgtgtgccatttttacttacacgtaatatattttgaccagatctggtttgaatataagaagctacgctggtcttactcttattcaatttatgtaccgtatttttaaggtcgctgacaaattgcttaagcccaacttcatctttgatatagttaatgtatacttttgcttcttcagaatctactttattatctttagtacttaataatgttgctactttttgtttatcattattctcaatcgcattcactaatattttagtttgcgcttcaggtgaattgaagtttcttagtaaaaagaacaatataataattaagattaaaatgaaaaaaccaattgcccaaggcaccatttttctcatcttgatgttattagtttgtatatcttcatcggttgactttctatataatgcttgacgactatcaaatttatgtccacattgtgtacatatctgtacatcatcttgtgcttgttgtccgcacttcgggcaagatttcatactttcacctcaattctgttcctcttcaattgttatatgtatatcacaaaaattatttcattattttaccattattattttacaaatattatcccaagaatacaattcaagaaatgattaactttactttagaattgtaccttattacattatttatgaaagtactctctcaattataactaaaaagaaggtgttcaatacatacatatttagtcttatatttgaacaccttcaaaaacctatttatgattgctatatgttttaatgcgatgattgatgacttctaatacttgccttacattttcaatatcttcagaatttaaatcattagtaatatcttgcgcaatatctgtcataatcgcattacgttctttcaaatatgctctacctttgtcagttaaggttatgaatttcaaacgttgatcaatatttaaatttggtttatctaacttaactaatttagcatcgattaactttttaattcgtcggcttactgcggccttatttacaccttgtctttgcgtgatttcactaattgtcaaaggttctttatttaacatacctaatacgttagactgctctaatgaaatttcatattcattttgtaaatctttcaacatttttgcagttaatgcgttaacgttatttataaactgctctaaaaattgaatatggtcttgtaaatgttttaccataattatttctccctaattactatttttataaagtatcctcagcaatcattgtatcgcacatctaaaaaacacaaaaatattgacccatatataatataacaaattaagatttacatgttgctgctttctccttgctttaataaattaaatcatctacatttatatttaatatttattataagcgaggtgtcagtatgttattgaatttattattaatatttatacttatcgttatttgtccgttaattttcaactatactctgacgttaaatttaacatgctacatcttagttgtcatatcgatatttttgtcactcatctatagcatcatgacctatactttcccttggtctatgtttgtaacatttataataatcagtattatcatgctattcaaacatagatatttattttctcatacttctagtcgcttatttattaaaaaattattatctttttcatataaatttgtactctacacatcagcacttctatttataagtacgattcagtcacctattgtgaaaggtttgtctatgtggttagctatattatgtctttccctgttactaacctttatttgttatctcgtttggacagtatcatatagacatagatcatacaacaaagaagttgatatcataattgtgttaggtgctggtatttttaccgaatttgtcacaccaatgcttgcagcgcgtttagatcgtgcacttgatatctatcaacaacaagcatcagcaacaaagatcattgtatctggcggacaaggaccagacgaaccaatttctgaagctttagctatgcaacgttatttgattgcacatggtgttgataaaacagatatactaatggaatctcactctataaatacatacacaaactttttatattctaaacaaatcatcaacaatttgtatcatgaagcagttaaaattgtttgtgtaacaagtcagtttcatgtattgcgcgccttacgactagcccaaaaattaggtttatctatcgatggtgtcggaagtcatacaccatatcactttttcttacatgtgctcatcaaagattatctaggcgtaatgtatcagtatagattgttattaacgttatattgttcaagtagttggtttatatgtctttacgccgcttttatttataatagttaatccacaaacaaactattattataggttgtttctaatattgcgtcaaactatctttaaatattcgttaatccttgattagacaattgttatattgaaaataaataaactaaagagtctgggacattaatccctaaaaaaaacagcagtaagataattttcaattagaaaatatcttactgctgttctctatttatacaatacttcgtattgaatggcttcgctatgcccatctggcacattactgtaaaattctataaatagaatttttgatgacgggtcccttcctagggtgccgtctcagccaccccaaccggcacattgttgtaagctgactatatgtcagcttctgtgttggggcccctgtcttcgactggcactgctccctcaggagtctcgccattaatactacgtattaacatgtaattttacttttaaatactttaaaaaaataagacactttggccaacttaagccaggatacaatttacaaatagcgacaaattctcaatttgttttatcctatgacctatttcaaaacccaacagatactagaactttaattccatttttaacaatgattcaaaataccttcggttatttaccggagtatattgtagctgatgcatgttatgatagtgagcaaaactatatggctattatagatgattttaataaaacgccacttattacgtatgtcatgtttattaaagataaaactagaaagtttaaaagtgacatttttaacactcaaaattggaaatatgacgaacttaatgatgaatttatatgtcctaataacaaaagaataggttttaaaagatatgcataccataatgatagatatggttttaaacgtgacttcaagctatatgaatgcaacgagctgtacattataaaatacatatcaaaaaaagctgatttctatcaaataattaatagaaatcagcttttttacattgcctaagaacttaatgtcccagcctgttttttgtaaacccaaatcgtattctgttatctaacttttatactactatgtcttaaatcattaacatttagcgtctttacaagccactaatcagttattttgccatcttctaattcaatcactcgatctgcatattcaaataatcttcgatcgtgtgtaatcataataccaatcatttgttgttctttaatttgttgacgtatcatctcaacaacttttgttgctctatcggcatctaaacttgctgtgggctcatctgctaaaatgattttcggattattcataaatgctctcataatcgcaacacgttgcttttcaccgccagataactgatgcggatatacattcaagcgatcttctaaaccaatatttttcaaaagttgtattgctcttgttgaactttgttgtttggtcattcccgcttcttgacctacgagtgtcaattgctctatcacttttaaataaggaactaaatgtgaagattgaaaaataaaaccaatatcttccaatcgtaaatcactaggacgatgctgtttatcaaacaatggcgcatcattgtaaagcactgtaccactcgtttgacttaacaatccgcctaatatcgttagcaatgttgttttcccagaaccagaggcaccatttaaaatgacaaattccccttgttccacttcaaaattaataccttttaaaacttttgtttcagacaaaccttctccgaaatttttgacgatatcttcaacgactaatgccattattctgcacctccaattgcttcgataggatccactttaaataatttgataaatgatagtgaggcacctaaaatcgctactaatataaatatccccaccattaataaaatattttgcgttgttaagtaaaaaggcatcgttaccggcatcataaatgatagtcctactatgatgatcacagcaatacctaccccaattattgttagtgttaaaatttgtaaaactaacgcactcaataaatgtcttgtcttaataccaattgctttcaaaatgccaatttgtgatattttttgaatcgtcataacatagaaaaatgcacttagaacgattgctgtaatagcaaacaaactaacaatcatcatatttaacggtgcttgctctgcttgataactcgcaatattacctgttaaatctttttcactcacaacttgaacgtcatttattttattaagctcatcacgttgttgttgtgttaaatttttcactggataaaatgccgtattaaccttattcaatgcattaaatccgttatcgttcaatagcacaatggaactatgcgcatacattgtgtcgtttaaaataccagaaactctataactagttgaattatttttaaaatgtaatctatccccgactctaatgttgtctgcagctaacttatcattaatagcgacctcatgagcatttttaggataatcaccttttttaagttgtatgcgttgttgtttaacgtcattcattgtaatcacatcttgttctttattagataatttcaatgtttgaatattcattttatatggttcttgatgaattacctttttaatttgattctgttgcgtatcactaagttgcgatttctcaatttgcggctctttcattttttgaacaacatattcatcattatcaaagtgttcaaataacgaaatattctccctaccaagcccttgagctaaaccactaataaataacaccataatacttaataaaagaatgattaatgtgattaaaatataacgaaatttgtaaaacataatctcttttatcgctaatttcatatcgattcacttctccctatttcttctttagcgtcagtataaggttgaaatatgaactcaatatgaacaattgtttttttacgcaaaaatattttacatgtataataaatgaaaaagataagggagtttatagctatggtgcaatgtcttgttgtcgatgacgatcctcgaatcctaaattatatagctagccatttacaaacagagcacattgatgcatacacacaaccaagtggtgaagctgcattaaaacttttagaaaaacagcgtgtcgatattgcagtggtagatattatgatggatggtatggacggctttcaattatgtaatacattaaaaaatgattatgatataccagttattatgttaacagcgcgggatgcacttagtgacaaagagcgtgcgtttataagcggtactgacgattatgtaaccaaaccctttgaggttaaggaacttatttttagaattcgtgctgtattacgtcgatataatatcaattcaaattcagaaatgactattggcaacttaacgctaaaccaatcctatttggaactccaagtatctaataaaacgatgacgttaccgaacaaggaatttcaattattatttatgcttgcagcacgtcctaagcaaatctttactcgtgaacaaataatagaaaaaatttggggctatgattatgaaggagatgagcgaacagttgacgttcatattaagcgactacgccaaagattaaaaaaattaaatgccacacttacaattgaaacagtaagaggacaaggctataaggtggagaatcatgtttaaaacactctatgctagaattgcgatttattccattacggttattttatttagtgcattaataagttttgtattaacaaatgtttactatcattataatttaaaagcatctaatgacgcgaaaatcatgaagacgcttaaagaagcaagacaatatgaacaatcagctaaaccaacgcacattcaacaatatttcaaacatttagggcaaatgaattaccaaataatgaccattgatcaaaaaggtcataagacattttatggggagccatttagagaagatactttatcacaaaatgctattaacaacgtattaaataatcaagattaccatggtattaaagataaaccattcgcattattcgtaactggatttttcgacaatgtaacagataatactgttggtattaactttaagacaaaagacggttcaatagcagtatttatgcgtccagatattggagaaacatttagcgagtttagaacattcttagccgtcttgttaatgttgttattatttatctcgatttcattagttatcgcatcaacctattcaatcattcgtccagtaaaaaagttaaagctagcgaccgaacgcttaattgatggtgattttgaaacacctatcaaacaaacacgcaaagatgaaattggaacattacagtatcactttaataagatgagagagtcattgggacaagttgatcaaatgaggcagcattttgtacaaaatgtatctcatgaaatcaaaacaccattaacacatattcatcatttattaagcgagttacaacaaacttctgataaaacattaagacaacaatatataaatgatatctataccattacaacgcagctgagcggattaacaactgaattgttgctcttatccgaattagataatcaccaacatttattattcgatgataagattcaagtcaatcaactcattaaagatatcattcgacatgaacaatttgctgctgatgaaaagtcgttaatcattttagctgacctagaatcaatcaatttcctaggaaatcaacgtttgttacatcaagcattgagtaatttattaataaatgctattaagtatacagatgttggtggtgccattgacatcgctttgcaacatagtcacaacaatatcattttcacaataagtaatgatggttcaccaattagtccacaagctgaagcacgtttatttgaacgtttttataaagtgagcaaacatgataatagcaatggtttaggtcttgcaattacaaaatccatcattgaattgcatcatggtacaatccaattcacacaaagtaacgagtatgtaaccacctttactattacactgccaaataattcactttaatctctacctcctgaaaaaacatttctgtttttatttcaggaggtatcttttatattgattagcgctttctagccacttaacatttaatttctaccattcaacaaaatttaaatatatcgatggtcatttatggtttaataattttgaaggaggcattaacctatgatgaaactcaatttatttatcaatgcaaatgagacggaatcttatattgatatacatgcacctaaaatgaatgataacgttcaaagtattattaatgcagtcaatgatttagacaaatcacatacattagtcggatacatagacaaagaaatccatatcattaatgtatcagatgttataacattccaagttattaataaaaatgtaacagccattacaagcaatcaaaaattcaaactaaaattacgactttatgaactagaaaaacagttaccacaacatttcattcgcatttccaaatcagaaatcgtcaacaagtattacattgaaaaattattattagagccaaatggacttatacgtatgtatcttaaagatgcacactacacctattcttctagacgttatttaaaatctataaaggagcgcttatcaatatgaaaaatttgaaaaactcattatttattagcttaatcattggtttgtccctttcactgttctttagtatgttatttgcagacggcaaatattatccactgaacccacaatcaactattggcatattgtattatacgcatttcacagaaactaccgtaatgttgatttctatcattttatggttactcataggcgtcgtctttttccttggagattttatctttaaatacacagattggagcattactaaagcaactataatgcatttcataacaacgtatgtcggattcttgcctttagcaatgcttgccggttggtttccactaacagtgcattatctaatcatattcacaattatcttcattgtggtttatgtattaatttggataattcaattctttaaaaacaagaactacgtagacactattaacaagcaactgaaacaattaaaatgatttttattaaccactaaaaaacggtaatgtctatcacattaaaaaagacattaccgtttcgtttattatttaacttgtaaatacttagttacttcttcattaattttatgatataaatcctcatgatctgttaagcgataaccaaatgacggcaccatttctttaatctttggttcccatcctttgaattcatcacgatagcatctctgtaaaacatcaaacataatatctacagctgttgacgcaccaggtgatgcaccaagtaatgcagctaatgtgccatcatctgacgtaataacttcagtaccaaattgtaagttacctttagaatcctcagtatccttgattacttggacacgttgccctgctgtaatcacttcccaatcttcatttttagcatttgggaaaaagactcttaaatcatccatacgctcatcattagataacatcaattgtgacactaaatacttcgtaagactcatttctttgatacctgcagataacatcgtcacgatattatttggtttaaccgatttaattaaatccatatgtgaacctgtttttaaaaatttaggtgagaaacctgcaaatggaccaaataacaatgaacgcttgccgtctacaaaacgtgtatctaagtgcggcactgacattggtggcgcacccactgctgcttttccgtacactttagcatgatgacgatcaatcacttcttgatttgtacagcgcaggaataatccacttaccgggaaaccaccaatatgttttgattgtttaatcccagtcttttggagtaatggtaaactcgcaccgccagcaccaataaatacaaaatcagattcatatgttgtcgtttcattagtttctaaatctttaactttaactagccataccccagatttctgtttcttgatgtctaatacattctgcttatattgaattcccacaccacgttgctctaaattatcaaataactttgcagttaacgcaccaaagttaacatctgtaccagtttcatcataagttaaagcaattggttcatcagacttacgaccttcaatcattaacggtacccaagatttcatttcttcttcatcttgcgataatttcattttttcgaataaaatacttttctttaacgttgcaacacgactttttataaaagctacattatcttcgccaatgacaaaactcatgtgtggcaccgcttgaataaagcgatctgggttatctaattgtcctgttttaactaaatatgcccaaaactgttttgaaatttggtactgctcatttatcttaattgctttactacaatcaactgtgccatccttaccttcttttgtatagttcaactcgcaaagtgctgaatgccctgtaccggcattattccatacatttgaactctcttcgccaggttgtgctaatttttcaaacactttaatatttttctcaggtgataattctttaagtaatgttcctaatgttgcactcataataccgccaccaattaagatgacatctgttttgctatgttgtgttgtcataacaaatacagtccccctttttaaaatgaataatggaacgttcgagaaatacgacatattaataccactttaaatcaataagtgtctcaataggttcccatggtgatgctctattactatctactatgtatattaatattttataataacgaaactactttaattatatactttatgtgcgatagcacaaagacaaaaccacaaaccttaacagctatcaaccaatttaatttgattgctgattactcactattcattttaacataaagcgctaccattattataatgtcaaacttctttcattaatgatccataaaaaaaagatgagatgttagaaaacatctcaccttctgtatatttatattttgaaatacgtttttttataataatgacaagatgaaagtccaaatacagatgaatattagtaaacatacactgtatttcaatgtcatttttaataattctgattccttaccaacttgttttactgctgcagttgcaattgcaattgattgtggtgaaatcaattttgccgctacaccaccaactgtattagcagatacaagaagtgaaccacttgttccaatttgttgtgcaacagaagcttgaattggtgcaaataatgagttgttatttacaactgatcctgtcataaacacacctatccaacctaaaattggtgatagaactgggaagacattacctgctttagcaataccttgacccattgctgcacttaaaccaccataagttgtgattttagaaattgctaagatgaaacaaattgtaagaactggtaaccacaactctttaaatgtaacgccgaataatctacctgcatctttaaagttaacctttttagacattaaaattgtaataataatagttaataaaatagctgtacctgtttgtccaataatatttaaagtcaatactaatggtttatgcgtaacttcgctgattgttccaggtaagttgaatttaaatactaatgatgataaagcaccatttggtaagaataagtttttaaagaatggcgcactccaaatcattacaatgactgttaatacaatgaatgggctccatgcatgtaatactgcttttgcagaatgtgcttttgcaggttcaatttcttcatctttattaacacgataaatgtgttttggttggaattttttagaaaatactgctaatgctaacattgttaataacggtggaataatatctgctaattcaggtccactgaatatagttaataatccttgagtaagtgtataagtgattgaaactactaaaattgctggtaatgtttctttaacacctctaaaaccatcaataataaagataagtaagaatggaataatgaaatttatgattgccaatgttaaagttgctgattgagaaacacctaatactgaaacatctccaggtaatttcaacgtttctacaacacctacagggataccaatcgcaccaaaagcaccagacgctgcatttgcgactaaacataacatcgcagcttttaatggattaaatcctaattgtgttaataaaagtgcacaaattgcaattggtacaccaaatcctgctgcaccttctaaaaatgcgttgaatgcaaatccaataagtaaaacttgaatacgttggtcttgtgaaatatttgtaatactatcttgaattgttaaaaattgtccagattcaacagtaattttgtataacaatactgccatcataacgatatagccaatcggaatgataccttggaagaaaccttcgactactgcaccagaagcgataccaactggcaatttgaaaaatggtattgcaattagtaatgttacaacaagtgttgtaatagctgcataaatacctttcattttaaaaacagttaaacatagtaaaaacagtacaatcggtattgctgcaattaaagacgataataataaattatcaaatgggttaaacgtatttactaacataggctgactcttctttccataaagtagtagtgtaattgcttcattaaaatcatgctctggctatagcattttgttatcgataacattttacagaacagtgagattaatgtgatttttttcacaattaaaatataccattttttcagactattaacaatatcactttcctatttaattgttttatttttcattttaaatctgttcatcaaaatgaattgtacttaatgtaatgaagtaacttatactattcatgaattttacataagaccgtgctaaaataaggaagatactacgatgaggaatggaagttatagcaatgattaaacagataaatgtttctaatatgcaaaagtttgaatctcaattaatgaaagctcagtctgaaggttatacacatgtcgttccatatgccaatgagataatgatttatcaatcgatgttagatgcggttcaattatatcctaagtctatcgtggttgattatactgtggatggacaatacaaaaatgattgtcactatttcggtcaatcatcgatcaacattgccgattgggctcaaaacaataattattatcctaacctgatatatgcgattcaacagactcttgatttaatacattattactctgtagaaacgattttcgatttagctttattgacacttctgaaaggtgatttatcaatcgatggtcatgtcgtttttgattttaaagcccctatagcaacaagtgcttcaatatgggaaactattaaaactattgaagattttgatatgatgtctcagttttatttgaataaaatggcttatattgatcatcatcctataccttttcgcaacctttttatcgaggattcagaacaacttaattcgccagataattggttgtattctaccaagtttatgctacctaaatggttatataaaatagcaaagcaacgtgctgataacaaacaattacaaaacttcggcctgtatacgaagcaaccaaacgttttaaaagatcacatcgtttttatcggtgatcatcatcaatatataggtaattcaaaatatttatttacttacttcgttaaacataatccaatgactgcctgttattttgttactgacgatcgtcgcggaccacatttcatatcacctaagtctgaaaaagctgacgaattgattaacagcgcacgcgtagttatagttgaaaatgatatacctgaaacgttacaaccaaacggtactttaattcaattacatcaaggcacaccaataatgcaattatttttagatagtaaagagcctattaaaaatatagaaacacctttttatcgtgctaaaaggtataatcgctggttgcaattcgattatgttatacattctgctgatgatattagccacttttatcaaacggcttttcctagtcaccaagcaaatgtattggcttatggtaatcctaaacaccaatatttactacaaaagagtaacgaaagtactactcaacaacagtataagaaatcgtttaaaataaatgatcaaaaaccagttttattatacgcacctattggattagtgagtgcgcaacaattaccactatcagatgctttattcaaagcctatcatgttgtggttcagggtgttgatgaagcgatcttaccagaagaggcgcttgttgcaccaaagtatcttagtgctcaagacttaattctaatgtctgatgtcgttatcactgattactcaaatataatatttgatgcgatggctatagacaaaacagtagcattatacactccaaatcacagtcaatacattgagtctcaaggtgttaacgaagatatttggcgtcatctatcaaaaatttggtatacagaccgacaattattaattaataatttaatttcccaggcaataccagtgattaaatatccacaaatacaacataaagaacaaccattagaatctatttcacaacttatattgtctaagatgacatctaatcaatagtgtttaaatttctcagtggctgtgaatgaggtttaaaagtactataaaacgtaaactttgatactttaaaatacgcaaaaaacggtaaaccctaattcatattatagagtttaccgttttattttttaacttgcatcatagttatattaacattattgttggtagtttggatcagtaaccattgcttgtccagtataatcaaccgttacaattgaatattttccatttgcatttgggtctttaaaactaaacacatacttatagttgccattatgttcttcaatagaataatcattatacactttattattactaccaaatttatttgcttcattattagccgcatttaaagctgtttggaaatttggcaattgctgtaaagcttgatttttatttccattaaacggataaatttgacgtgcaaccggcgcggcattttgtccataatatggtgcaacgtaacttgatttttgattattattcgcttggttattacttgattggttattatttgtttggttttggtcattgtttgttgcatttgaattagattgttgctggttatcgtttgcactattatctttattatctttgtttacgtctttactatcatctttattatctttcttatctttagatgaatcatttgtttttttatcttgttgttcagttttcgctttatcatctttttctttattaccgtctttttgttggtcactatcttgaccacatgcagctaaaaataatgataatgctagtaaccctgtaactaatcttttcatacatatctcctcctataattcgatattcattgaataatcttgaaatacatatctaccatgtgtatcttttcatggcttgttaccaaagacgtcaacattaatatgatctgaattatcacaatatccataactacaatctaaggttctttttattataccctaatttttgttcattattatttaatttttgtgaattttatgttttctataaatttaattattttactttaacaattcattacgcatttagcatttcaaggtatacacaatatttattactatgatttcattttatctgctgcaaaaacaatcattataactctttttccataattaaatctgtatccgttacatcacctgtttgaaaatgatgttcaccaaccactttaaatccatgacgtttataaaatgcttgagcacgaggattatgctcccaaactcctagccaaattttatgtttattatgttcttgagcaattttttcggccaattctatcaattgtgaacctcttccgccaccttgaaagtctttcaaaaaatatatgcgctgcacttctaaataggtctcccccatttcttcagtttgagcactattaatattcatctttatataaccaacattcgcaccatcttcttgataaaaataatgaaatgaatctacatggttaatctcttgtgtaaatttctctacagtataattgtctttaaaaaattgatcaaaatctttgtcatcatagtaagaaccaaacgtgtcataaaatgttctagttgctaattcaactaattcactagcattttgttctgaaatttctttgattatcccagccatataaatcctccaataaacagtgatcgaatcaaaatattacttatgttatttttcagccaaaactatttaaaaatacattaacacaaatcaattacaaattgtattgattgtgtgtaacatcaataaatgatacatttattccagtaaaatggccgtattttcaaaagagaaaaagagaggatgtatcgttgtgatagaaacatttaaagcgtttgtaattgataaagatgagagtggtaaagtgacaccaactttcaaacaattatcgcctactgatttacctaaaggagatgtgctgattaaagtacattactctggtataaattataaagatgctttagcgactcaagatcataatgcagtcgtaaaatcgtatcctatgattccaggaatagatttagctggaacaattgttgaatccgaagcaccaggctttgaaaaaggagaacaagtaattgtaacgagttatgacctaggtgtcagccattatggcggttttagtgaatatgcgcgtgtaaaatcagaatggattatcaagcttcctgatactttaacattagaagaatcaatgatatatggcacagctggttatactgccggtttagcaattgaaagacttgaaaaagttggaatgaatattgaagatggtcctgtactcgttcgcggtgcttcaggtggtgtcggtactttagcagtactcatgcttaatgaacttggttataaagttatcgcaagtacaggtaaacaagatgttagcgatcaattacttgaacttggtgccaaagaagttatcgatcgacttcctgttgaagatgatcataaaaagccactcgcatcatcaacttggcaagcttgtgtagaccctgttggtggcgaaggtattaattatgttacaaagcgtttaaatcatagtgggtcaattgcagttattggtatgactgccggtaatacttatactaattctgtattccctcacattttaagaggtgtaaacattttaggaattgactcggtatttactgctatgaaattaagacagcgcgtttggcgtcgtctcgcaaaagatttaatgcctgaaaatttacatgagatcaagcaagttattacatttgatgaacttccagaacaacttaacaaagtaattaaacatgaaaataaagggcgcattgttatcgatttcggtgtagataaatagtattcatgaaaaagacatcccgttatgcgagatgtcttttttaatttagtatttgatatacataccgcctgaatctggttcggtaggtataaatccaaattttgtatataatttatccgctgggtagtctgcaatcagactaacgtatgtactctcaacagccacacctttaatatattgcataatatgctccataattagactgccgtaaccttgaccttggtaacttttcaaaactgcaatatcaacaatttgaaaaacagttccgccatcgccaatcactctacccataccaattaaccgatctttatcatacaaggttactgtaaataaggcattaggtaatcctttttcagctgcttcgcgcgtctttggactcatacctgcgttaatccttaatgcgcaataatcctcgcaagtcggaatatcatatgtcactttaaccattatttaccccacttttcatcacacaatatatcaacctagtataaatgtttatttacaatagtcttattcgcttctttaaacacttcatgatgacttgaaacataaccctctgcattcgcatctggttggatatatgttttagcaaggttcgctgcatttgcaccatcactaaatgcacttgcaattagatgtgattttgcatcatgataaacaatatctccacacgcatagataccaggtatactagttgtcgtattaccaaatcctttaacacgacaatcatcatgcatatctagctttgaagatgtttcactcaataatgtattacaacgatcaaacccatgactaataatgacatcgtcaaatttaactgtatgcctatcgccactttcaacatgttccaaaacaacttcacttatatgcgtttcatcatcattgccgaccaagtatttaatacgtgtttttgggcatagtttcacatttaaatctgtcaccaacgttttcatcgcttcatgaccacttacatcttcttttcgataaacaactgtcacgcttttagcaatcttggcaatatcatgcgcccaatctaatgctgtatttcctccacctgatattaatacatctttatctttgaaacgtctgtaactttgtacaacataatgtaaattagttaattgatatctctctacacctttaacatctaattgttttggattaataatacccgcaccaattgcaatgataactgctttcgatgtatatatttctcccgcttctgtttcaacttcgaaatgacgttctgcctttttcctaatatctaccacacgttcattcaaatgaacttccggtttaaaatataatccttgcttaattgtatcttttaaaatttcatgacaaggttttggcgcaatgccgccaatatcccaaataattttttcagggtaaattctcatcttaccccctaattcagattgaacatctatcaatcttacagacatatctcgcaatccagcataaaagcttgcatacaaaccagacggaccgccaccaatgattgtaacatctttcattatgtgcctcctatgactctctatattcatttctttcattaacgtgctcaaattgataattattatcatttaaagccattatactattaatatttatattgttaaaataaatcgcatagttagccatgaattatcaataactatcccatcacaatataaaaacacacctttcaaagtaagaaacaacaatgttcctttgaaagatgtgtatattttttagttctagttatattattttttaaaagactcatcacgtggttctttaagaattgcttgtcttaaaaggaaaaatagcaacaataaacctgcaagcatacctgtgtgcccaatacctgcaaagcctgcaaatgcttctggagagtatgatttaccagtgacttggaagaatccttttgtcaccatcatacctatagtaacgataacacctatgttatatacatagaagaaccagttaaataagtagtaacttgataatttaaataacttctccaatggtaataatattaaaaacataaacatacctaaaataagtgtatgtgtgtgtacaagtgataattgtgttgtaccagtaaaatcatatgcttttgttagctctctatagaaaaagccactaaataaacctatgatcatataaaaaagaaatgaatataataacctacgcattttgaatcctccctcaccttttcattatatccgattatacctattataacagtgacaaaaaagcgaagatatgacacaactgaatttggtttagcacatagtatgacagctaaaataactttacatcaagcgctatacaaataaaatagctataccatgacgctcgctacaaacgtcttgtatagctattatttctatttattaaattatgacggcacttcagtacgttttgtgctatgttttctaacaatagctgaaactaaacttgatacagcgccaaaaatcataaaccctataaacatccacattgtactatttaattcaatatgatgattcaagtataatagttctcttacacttgttgcatagtgtgtgaatggattccaatcatatacatatttttgataactttcaggcaacatttgtttaggtaacgttacaagttgcatactaaagaacattaaaatgaagaaaattggaactgacttcatacctagccataccataacacctaaaataaggcccacgaaaccaagaatcgcaaatgctacaaaaattgcgatacgatttggatggtcaaaatcaaatctttgaacgccttgcatgaaataaatataaacaaagctacctgcaaatgctgcaacaactgcaaatatcatctgtccaattgaagcaatgatacgatgttgcacgacgatattgttactagttctaaatgcaaagaacaataagatagacgttacgattgaacctatccaaattggcataaacattaggaatggtgcattaccacctgcttggtgatctttaactttattaagtttttcattatccacttttactggattcgtcaaaccattgatgtccgcggcattgactttaacattttgactcgttaatgtttccaaactttgcttcgtaatttgagcattaatattatcacccataccagttaacacagctgatgcaatttgtgaaccttgtaagcttgatccttcacttacaatcgttttaaatttagcctgcttaacctctacttgttgattccccattttttgtttcatttgttgaaccacttgtggcggaatttcacctgaagcaactttttgttgtatttcttcttttttactatccataactactttttgtgttttactcatagcatcttttgaaaagtctttatcaataatagctactccaaagattttttgatctttcaaatctttttcaaggtctttttcactatcaaccttaacccatttaattttattagaatcactatctaataatttatcctctaattttttaccaatgttaacatttttatcttgaatcgttgtacctttatcctcgtttaatataccaattggtaaatcttttggtttaggattatatgcaggataaaaagctaaagaaaagattaccaagataatcatagttgctattggtgcaatccataataatttatttttaaatatattcattttattaattacctccttattagacaatgtgttgaatatttcgcatgttgtctattataatatgtaagtgggaataaacaatacacaatgttcatcaatacgttcattaatagacaaatacacccacattgttcaataacacaaggaggttgatttatttttgaaagaagataggcgaattagaaagacaaagtcctccattaaacaagcgttcactaaattactacaagaaaaagatttagaaaagattaccattcgcgacataacaacacgcgctgatatcaatagagggacattttacttacattacgaggataaatatatgttactcgcagatatggaagatgagtatatttcagaactaacgacatatactcaatttgatttgttacgcggttcttcaattgaagacatttcgaatacttttgtaaataatatactcaaaaatattttccaacatattcatgataatttagagttttatcatactattttacaattggaacgcacgagtcaattagaattgaaaatcaacgaacatattaaaaataatatgcaacgttacattagtatcaatcattctatcggaggcgttccagagatgtatttttacagttacgtttccggagcaacaatttcaattattaaatactgggtaatggacaaacagcccatttcagttgatgaattagctaaacatgtgcataatattatttttaatggtccattaagaataatggcagaaaaccgtttgcataaatcaaaccttgattcactaacttaagtaatactcgcttttcctaaatcctttagaaaggaactatatatcatgattacttcattcagacattctgaagatatagataaatatattataaaaacaccattagatcatacagcgtcatggattaatgtagtagaaccagaccgagaagaaattgaaaatcttatggaacaatataatatacctgaagactttatacgtgaccctttggactcagaagaaagttcccgtattgaatatgacgaagatactggttactcattaatcattattgatttacctatcgtcaattcaactaatcgtagcgttctatcttttgtaacgattccattaggcattattattggcaacggtattatcgtaacagtttgtgacgctgaaaatgaatttttagaaaatttacctaagcgtgatattaatttaaaatttcacagcagatttgcattagaaattttaactactattgccgaccattataatcgtaacttacgattacttaataaaagtagaattcgtattgagaaagaactaaaaaataacattactaacaaacaacttttcaaattaatggaagttgaaaaaagtttagtatactttttagctgccttaaaaggtaacgatacaattattaaaaagttattccgtttacctgcaattaaacgttttgaagaagatgaagaattactagaagatttaatcattgaaaataaccaagccatcgaaacaacagaattacatcaacgtatcttagaaagtatcacaacatcatacgcttccttattatctaatgatatgaatacgattatgaagacattaacacttttcacggtactattaacgttaccaacactcgtatttagtttcttcggtatgaatgtgccgttgccaattgatgaccatagttatatatcttggattattgtggtaggtatttcattaattcttgtcgtaattgttagtattttcttatggcgtaaacagaaattataactaaattaaaaggtatgacagcttaaagtttcatcctattgcatttgcaatgactgatactttgattactgtcatacctctttttttattctacaacttctttatttgcttttcttttagataaaattaaagtaactgttatagcaatgatgaatgatattgtcataccaacaaagtagtgtaaccatcctgcatgtactggattgattgaaataaatcctggcaatccagcagttcctaatgcgattgctttaaccttgaagaaagcaatatatgctgaaccaatacctgatccaacgatagcgccaataaatggatatcttagttttaagttaacaccaaacatagccggttctgtaataccaagtaatgctgaaatacctgcggcagatgccacaccttttaacttcttattttgtttaataataaagaacgctgcaattgctgcaccaccttgtgcaacattagacattgtcgcaatcgggaatataaatgatccacccgttttagtggcatctgcaattaatgtcgtttctacagctataaagctatgatgcatacctgtaataacaatcggagcatacaataatccgaatattaatccaccaattgcaccaccaaattcataaagccatgttaaaccatctgataaccagtaacctaattgtcgagtgattggacctacaaatgaaaatgttagaaatgctgttataaaaatagataacaatggtgttaacaaattatctaacaccgttggaataactttgcgtaaccctttttcaattgaggctaagatataagctgctacaagcataggtaacacttgtccttgataacctacttgattaatatgcaaaccaaaaacatcccaatatggaatagccttacctgcttcaactgcttttgggaaatcgtatgcgctcattagcgatggatgaactagtatcatacctaatgcagcacctaaaaatggattgccaccaaagcgttttgctgcactaaatccaattaaaattggtaataatgtaaatggtgcattcgcaaaaacatttatcatttcagctaatccagcaaattgactatatacatctatcaatgatttacctgaaaagaataaatctttcgcagtcaaaatgttatttaaccccattaataaaccaccagcaacgatggctggtataatcggaacaaagatatctgaaagcatttttacaaatcgctgtaacggattcatatttttagcagattgtgctttgacttccgaagtggttgatgcttcttttccagttaatttttccagttcactaaatactttattgactgtaccagacccaataataatttggtattgtcccccagtagaaaacgtccctttaactacatccatattgtttagcgcctcttcatttactaaactttcatcatttaaaactaatcgtagtctcgttgcacaatgcgccattgcatctaaattctcttctccgcctatcgcgttcaaaatttcttctgcggattgcttataattcatatatttagcctcctaattagaaccggttccatttattccactttattgtaaccggttccaaaaatatttgcaacactctattatcattttatataaacacctacaccatttttgatagcgcattcatttttattgctatactacatgcatgtatattaacattaattatcggaggtaattttatgaaagaacgtggctatatcgaacagctttggcgtgaggaaaaatatcatgtattgttacacagtcaacagtcttaccaaatgataaggaatgctttaaaaacggatttatcacttcatcaagttcaacaaatgattgatgttgctttgttaattgaaccgagtataggaagtgtatgtaatgcttttgatcatatgtggggatatttaaaaaaatgtgcgaatgaagaagaaagacaacaatcaaaactacttaaagctgattttattaatggtaaaatcgacacccaaactttattagattttttagcagaacttgctaataaatatgatgttcaatatttactacaaagtcgtgttttaaacacaaaaagaaagagatagattgaaactttagttgtaacggacaaatagtagtcattggagttcagcaattcatactttgtactaaagtttactataatctatctctcaaggtttaaatgtacatatctatattaaaatgcgtttcatgatgttagaagataccatacacatttaattagttacagcataaatcaatttatacccttaattattacattgtttatattttaaattcgggggagtaattttaagtaatatcttgttgctgctaattctattgttaataaattgatattagatgtagaaattgagtgtgaaagttaataatagatgatttagctagtaacataattaattcatatatagtcaaaaagttctgttagatactgttcttgatgaatattctttgatgttaggtgttagctattctagatgagtttcttagatgtggatgcctgtcttgatgaagttatctatgatgttaatataatacttgatgttgattcttagatgttagtgcgatttcaagatgctgattctttgttgttgcactatcttggtgacgtttctagttgtttatagttatcgcatctcttgatgtaaaatctaagatgtttatgcatttctagatgttaattcttcgctgcttaagaattatcttgatggtaaatctagttgtgccatgcattttctcatgatgaatctaaggtgttaattcattgatgtgtgctgtttcttgttgcttcattatcttgatggtgaatttcgttgtctaatgcactttttcaaatgattattctaattgttacggcaataactagatggattttcttagatgttcacttttctagatgtttatacttatcttgatgttttctaaacagaacttttaaacgctttattttttagtagattgtttaaaatttcttagttgatggttattgttgttgatttgaataatttgtagcgaatattttgtaacagggctactaagaatttttataacaagaagtgatttcaatcgtactaattttcagcgtttgatgacaaaagtgtatgtccaaacttaaataatggcgataaaatttaagtcatgggtacatttaatgttttttgattcaaacttccattttggtcaatttgctttttttataacatagttgaatatcaataaaagattagcaagttagttcaaaatggctatgtattgttttttgaaatacataggtttgaaatctatattaattatgcaccaaataatttaattagactctatcgaaaatttccaaattttgcttactatctttctaattttacttttatattgtgcgcaatgcataaaaacaagcgttttcctaggagttttcattaatttcttttatttttcactattaccttttcaaaaatattcaactataataggtatactatccatgattttaaaaatttccatgttttacatttaaatgatagatttcaatatatattaggcaggagagagaaatatgacatgccaacttaaaatacatcatacattatcgacaataccaagtcgtaatattaataatattatggtgctattttcacttacaagtaaactcaatattacgattaatggtgaaaccaaagacgtaagtaattatattatcttaattaaccatggtgatatttataatattaaccacggcgaaaatataatcgaattaatgatacccgttttttatttttatcaacaagatgatgatttctttaatggttatttagatcgtcatttattacaatcaagtaattatattaagtcattaattgccgatttaatcagtacaccaacaagttcttctttaatggggaaaaatataggtcaaagtattatagacactttacttaaagaagcttttataagaatagatcatgaatatttaccaaatattgctttaagcaatccggtgttcatagactgtgtaaactatattcatgacaatattgatgcgcacttgtctttaaaagatatagcgatgcattgcaacatctctgaatcatattgttctaatctttttgttcgatatttgagtatgaattttaaagattattttacaagtattaaacttgttaacgccatcaatttattactttctacaaaacattctattacaactgtttctgaattggccggttttaacagtcatacaaattttgcaaatcaatttaagaattacttgcattttagtcctaaacagttccgttcactcgtttccaagattactgaaccaccacaaatacacttccaacaagataacgtatcacaattcactgagttaatttcaacaattgatttaacagctcaactggctacaaatacaacagatattcatatagatgattttaatccgaaagatcgaagtcagcgtgccaaagtatttgttcgatttagtaatttcaatgaactatttcaatttattttcaatgaatattacgatattaactttgagcacttaccaaaacctgtcgttttcattgacgatattcacgatattgagattagccaaacgaattacaacctgttaaatagatgttttgaaaagcttttcgaaaaaaatataggtttagcaatcgctattaaatcaacacaacaattcgaaacgatgaagcaattaatactaacatttttacaaggcaatcaagactataagacaagcaagaaattagttaaatttatgctcgtattttgctctaattctatgacagcagaagaaattcatttatgtcatcttaaaattaaaaacaaaaataaagaaattaaatatagtgtgacagtcgatggctttttagaaacttattcaaccgtggaacaagtttatgatgtcatgcagcgtcttaaattccattattactttattgatattgaaaattcaaaaactgcaacacatcttatcactaaaaaccaacactatcatcaaactgacactcattttgaacagtataagaaatttattttagattcaggtatatcatcaacacaatttgtatataataacctgtctgtaagcggatttaaatatactaatgatggtaagaatccaattcaattatctgacatagtgtatcacttaatcgcattattacgatatggcggtggcattagctatcaattattagatgaccattcaaattatatttccttgtacaacaaatatggtagccccctaccattaatgcatttatataaaatgtttagaccttttgttaatgaagatattgaaattacaaataattatgtattgagtcgtaaagataataactaccatttcttattattcaataaaattaatgatcgatatatgtcagacgtaaaacaagatttcattttccataatgaattacctcaagactctttgatgattattaaaacattgaatcatgaacatggttcaattcaacatttgcttccaataagcgatcaacttgtttatatagaaaaagaaattttagatgaattagacaaaacgaattaccctaaaacggagcttgcagttcaagaagaaactggtcgtacatttgaactcaagttaaatcacgacgaggttaaatatatttgctttaaaccaagctaaatactaacagtcctcttgtgtttagtttcttacgttaaaggctatttatatcataaggagatgatttgtaatgagtaactcacaagcaattcaagcaattgaaaacgtgttagcaacgtcaaaagttggtgtattatcaactgcatataataataaacctaatagtagatatatggtcttttataatgatggtcttactttatatactaaaacgaatatccattctgctaaggtcaaagaaattaaagataatccagcagcatatgttttgttaggctataacgacacaactaatcgtagtttcgttgagatggaagcgacaatcgaaatcgttacagaacaagaagtgattgattggctatgggaaacacaagacaaaagctttttcagttcaaaagaagacccagagttatgtgttttaagagtagttccgcaatccattaagctaatgaatgataaatcattagatacacctatcaaaatcgatttataacacaaagtgtatataggaaataacttttatgaattctagatataacaatgttaaatacttaaaataactcgctataattaaagtgtttaatatgtttacaattcaatttgcaatgtattgttttttagacacactttattcacatttaacgtgattagggtgtgtctttttaaattaattttatgtaatataaatactgcatttgcaaactgttgcacttttaggtataacagaattaactacatttaaggagattgatgaaccatgaaaaagaaaaaaggttttggtcttggtattagtttaatcgccatcatgttaattgtatgtattgtattagtaatcatgatgatgactggcggaaagaaagatacatactatggaattatgaaagataatactactattgaaaaaatgattagtgaaaaagatgaaagtattgaaaaaaatgttaaattaccttcagattcagatgttaaagttaaaaaaggtgattttgtaattgtttataaattagcagattcagataaaattgttaaagttaaaaaagttgaccatgacgatgtaccacatggtttaatgatgaaaattcatgacatgggcaaaatgcacatgaaacactaattgtaatttaaattacaaattttagttgccatcaaggtatatacgagtaaaagcagcggtaagttgatttccaatttggaatcattttactgctgctttttatatttgaaatactttcatattgaatagctccacttgccgttcgcctgcgctttgcgcatgcataaaagcccctaacaacctgaggtcactgcgctccggttcgcctgcgctttagcgcatgcataaaagcccctaacaacctgaggtcactacgcttcggttcgcctgcgctttagcgcatgcataaaagtccctaacaacctgaggtcactacgcttccgttcgcctgcgctttagcgcatgcataaaagcccctaacaaccaaaggttgtaaggggctttaaatgtcagatagtattttttaaattgattttaaatattcttgaccttttgctttgtcatatacgttttcccatttagctataacgattgttgataatgcattaccaataacgtttacacatgtacgtaccatatctaagatacggtcaacaccaataattaatgctaaaccttgtgccggtaagcccatggcacctaatgttgttaataaaacaacgattgaagttcctggtactgccgccatacctttagacgtaatcattaatgttaacatcaacacaatttgctctgataatgttaagtgcattccatacatctgtgcaacgaataatgctgcaatagattgataaagtgctgatccatctaagttaaacgtataaccaattggtataacaaaagaagtaatttcttttggagaaccgaagttttccattttcttcatcattacaggaagtacagcttccgaacttgatgtagaaaatgctaaaagcaattcacttttcaagattctaataatattcatgatattaataccacacatccatgcaactagtcctagtatagcgaatacaaagaacaccattgcaaagacaacaactaatactaattttaatagtggtaataatgcggatgcaccaaatgtaataattgtagtacaaatgaatgcaaacactccaagtggtgctaattttaaaattttattaatcatccagaacacagcttcaagcgatccgcttaaaaattctttaactggttctgcttttttacctacagcagctaatcctaatccaaagaatactgcgaagaagataataggtaataattcacccttatttaaagcttcaaaaaagtttgtcggaataatatgtacaatggtatcaataaaatgatttccatatgtagattgttctgctgcatgtgcagttgattgatatttagaaatatcacctttaggtaattttgttgggtctaatccagcacctggtttaaataggttaccgaagataatccctaaacctattgcgattgttgtaataatttcaaagtataaaattgttttccagccataacgccctacagttttcgattccccaacgttcgaaatagaaagcgctagtgagcaaaatacaactggtataacgatcattttaattaaatttaaaaatacgtcaccaaatggtttaatgtaatttgctacgttttcttgtccatataataaaagtcctacgacaacacctaacactaatgcaataacaacgctaatttttctcttgaatagagccatagtacaaactccccttcatctgacatcactcaattatatcagaaaattgataattatctataaaaaattaaaatatttatcttttatagatgtcaaaaatcactaatttccatacaaaaactgtttacctcaaataattaaaattgaaggcactaaactgcttcaccagtttaacgtttcactattttgatggtttataattttgattgaaatatttatgctttgcagttttcaaacttttcttagtctctgtatcaaagccttcaacaaataatcctttattagtactgattggttgcacaacataagttacaccaggttcatctttaaatgtaacttccttatagaagagaccttttttagcactatactctgttttttctgatttaattttatcttttagatttttctcttccaagtaactgtcaattagttgaatattcttatggccttgatatgttttcagaccaaagaaaaatgctactgcaacaattaatgaaataaataatataatgataactttaatcgcgttttttttcttcttcattatgtaactcctttttgcttatctattcagtatgaacgaatcaatttatttaataaagagtttttaccagattgtaacaaatttttttattctcaatattattatagaaatcgaattacatacacgatgcttttaaaaaatttaataacaaattttattttactatctatcaaaataattgactacttttaacaattaaggatgatacaattacatttttttcaatttaaaaaatcagtcatatcagtaattaccgatgaaaatactaagatatcgatatattttgcattatttaacatttaaattcaattatagacaattcaataattgcgatgaaatcagtacttgacaactattacacttcataatattgtttattttaacaaggagtgattggatgtatgtagaaaacagctatcttagcaaacagttgtgttttttattttatgtttcttcaaaagaaataattaaaaaatacacaaactatcttaaggaatatgatttaacctatactggttacattgttttaatggcgattgaaaatgatgaaaaacttaacatcaaaaaattaggtgaacgtgtgttcttagattctggaacactgacaccattactaaagaaattagaaaagaaagattacgttgttcgaacacgtgaagagaaagatgaaagaaacctacaaatttctctaacagaacaaggtaaagcaataaaaagccctcttgctgaaatttctgttaaggtctttaatgaattcaacatttcagaacgagaagcatcagatataattaataatttgcggaattttgtttctaaaaattttgactattccgacaaaaaataactccctatcataaggtgatgggcagaagtatgcatcgatatgtttattcattatctttattgcttgtataaatctcgatgctcagttcttttgccctgattccttatcaggcacaaatctacccatttattacttttttatctccccttttactttaacttttttaatactactcatataatggctttgtaatacaaatttctataatggaagtgatgatattgaacttcaatcaattcgagaatcaaaacttttttaacggtaatccaagtgatacatttaaagatttaggtaaacaagtatttaattacttttcaacaccttcatttgtaacgaatatatatgaaacagacgaattatattacttagaagctgaactagcaggtgtaaataaagaagatattagtatcgatttcaataataatacgctcactattcaagctactagaagcgcaaaatacaaatctgaacaactcattttagatgagcgtaacttcgaatcattaatgcgtcaatttgattttgaagctgttgataagcaacatattactgctagttttgaaaatgggttattaaccattaccttgcctaaaatcaaaccaagcaatgaaactacttcatcaacatctattccaatttcatagttaaatttaaaatgaatacactactaaagccttaatgtcatgctacgaatattgcgcatgatattaaggctttgtatttaactaaatgaatggcatgtattacatatcaaccgtttttcaatgagccatattctttttggtataaatgacgcatggtaaataatgcaatacatccaaataccgctaagaaaataaatgctaaatgacttgatcctgttaaattagctacgtacgtgattactagtggtgggaagaatcctcctaaaccacccatcattgatacgataccatttgcggatcccgcttcatttaagaagtatgatggtactaatttgaagattaagccgttaccaatacctgcacaaatacttattgttaaacagcctacagtgaataatgcgatatggtctgaaatacctaaaataatggcaccgataatcataacaacaaaatcaatcatcaatactttaactgcattaaatttatcacctaaaacgccacctattggtcttaagaatgttgccagcgcaatgaatacacctgatcgaataccagcatctactttgtcaattccaaaatgatttactaagtagttaggtaagaaaataccaaatgctacaaaagcaccaaaagtaataaaataccaataacttaagtaatataatttgtagtttttagataatgttttcatttgagccattaatggtactttaattttacgttcttgtgtgtcaccaaaaatgaacataattaatgcaaataaagcgataataattaagtaacttctaactgttgtttgccaaccaataatacccgctatcggtggtgctaaaaatgaagaaactgctgtaccgatatttcccataccataaataccatttgctagacctactttttctttagggaaatatttaggaactgatgtaacaccaactgagaaaattgcaccacctacaccaaggaaaaatcctgaagccattaacatacccggtgtttgtgcttggcttaagaaaaatatcgggaataacaatacgataaaactagtaaagaatacccatttagcgccaacaatgtttgttaaataaccaaatggcacacggagcaccgatcccaaaataactggtatcgctaaaatgattgatatttgaccttcagtaacattgacatcttgtttaataaagggcattaatggcgcaattatactccaagccataaacccaaccactaaacttaatgtttgtaatgtaagttgaaagccaccttttgttttgtacatacgtttcaccttcatcaaaatcatttattttttaatagatatcaatactctgcctatatattagaggtcaatgttatttaaaaatgctttcatttatatgaaaacattcaatatagacaaagtattgactacatatatattttattatgattgtgaaaaagtgaacataaggattttcccttatttatgaagtgatttaccctatacaatgtccctttaagatgcttttagacacttattcgccatcattttaatcatattatttaggaacactcacatacttttcttaatttttttcaattagttacaattactgcttgaaaatcacgttacgttatcctttatgctgacaacataaggaggtttatcatgtataaaatcaatattattagatcagattccgtctataataatatactcaaggaaccaataaacgaccgtgattcaattttcactaaagaaatattagtaccttttaaaaagaaatttgaggtacaacatatgcctatttataatgatgacaaacagacaatgagtgcgattcaatttttagatgcctttcaaatttctcccaaagatttacgcatgtctgaccaaatgtcaatacaatacctgaataatgatttctggagtaattgcgaaaaatatttaaaagttgctatagatcaattttcaaattatagtatctcatctcaagtttctaactatcatttcacagtattacttggagatcgccaaaaaccacttatgtatctaaataaaaatcgcggtggtgatggtggcataccaggttatattatgatttatttagtgccgagtacaagtacaattaattctatgaaaagcttaattgcacatgaagtaaatcataatatgcgctatcaatatattgattgggatggcggaagtttgattgaattgattattgcagaaggattagctgaaaactatgtagaatcattgtatggtaaagcgcatattggaccgtgggtaacaaatactaattgaagtcgtgataacgtaaaaattaaaaatactatttataatcatttacatttaaagcatatatttgaatcgatgccttatctctatggtgatgatattaataaacttcaaggtaggcctatcgttggcttatctcatgctgccgggtatgcatgtggctatcacttggtaaaatactttttacaaaaaacaaacatacctattgaagttgctacaacacttccagcacaaaaaataataaatgaggtgactgaattttggcatacacatacactttaaaagatattattgaaattacaggtgtaactaaaagaactttacattattacgatgaaataggattattagttccagataaaaatgataaaaattatcgcgtttataaacagcaagacttagaaaaattacaaaagattttaatactcaagtcttttgattttgatatcgctaaaataaaacaatacatttcgtatgataatgaacaattgcgaaagttattatcagagcaaataagcaagttagataaaaagatttctgacttacaattaattagacgctctgtatgtgaatttattaaaggactctctctaatagataccagcattttaaacaagacactacagtcacaatatgataaagaagcatctataaaatatggtcatacgaaagcatatcaatcatttattagacgtaaagacagcttacaatcgcaggatatcagacataaattgacaactatcttcaataaatttaatcatatgtctttgagtcattatccaatccaagattgtagtgatctcgtatttgagtggaaggcatttatgaacactatcgctgattttgatgatgaaacattatgctgtattgctaaaacatatgaagatgatacgcgtttcaaagattactttaattcatatgataatcaaaatttagcatcatacatttcagaagctgttaattattttttgagcaatgtgaataagagcgacaatttttaatcctcatacagatgctacaacactgaatacaccaactaaaataattgttcaaagtagaaaactaatcatttattctctaaatcaataactatattaaaagttatacctttgcaaagcgaattagtataggttaccgaaaggagaaaggattaggttccattcgatttataaaaaaatatatttcgaaacatacaaaagcgccagaagataatcatttcctctcgcgcttttatactgaattatattaatttcaaactctaaaactctaataatttctttttcaatgcatattcaactagctcaggtttactctttaagccaagctttgtcataatatgcgtcttatgtgcttctactgttttcacagatacaaataatttctctgcaatttctttattcccgtaacctttggcaataagtggcaatatttctagttctcgttttgataagattttaaaaggatctgttgtgtttgcagtgtcctgatttgaattagatacaaattcattcactaaagatgttgtaagtttcatatctacatatgtttcacctttatatacagttcgaatagctaacaataattgttcatcaggtgcatttttcaatatgtaacctttcgcaccattacgcaacacatggaacaaatactcctcatcatcaaacattgttaatattagtattttagtttcaggaaaactgtcagcaattttactcgtagcgataagacctgactcacctggtggcatacttaaatccattagtaacacatcaggtttatattccattactttttggtaagcttcgacgccatctgcagccgttgcaacaacttccatatcattttgataatttaaaatcatagagaaccccgtacggacaacagcgtgatcatcggcaatgactattttcaattttattcccccaatgtatgtttcaaattggaatgttcaatgtaacattggtaccctcaccaattttcgtttcaatattgacgctaccgctgactaactcagctcgctcattcattccatataaaccgagtccagaacctttaggcttagaacttggatcaaaaccatttcccgcatctatcacttctgctaccaaatggcgcccagtttgacggatacctacatttatttcatttacatcagcgtatttcaacgcatttaaaatagcttcttgcactactcgataaacaaccgtttcaatatcactatcaaagcgagtatttttaatatttgatgtatatatgatttttattccataattttcttcaaactgtttaaaatatgatttaaaagctgcttcaaggcctagatcatccaaagaagcgggtcttaattcaaccgacatattacgtatatcatcaattaatttagcgacaatatattcaatattttctgcgtcttccaaaagcttagttgtatcttcttgatattttaataatctcaattgaacatctacattgagcatttcttgaatcacactatcatgtaactctctagaaattcgctttctttcattttcttgggctgagattgttttacgcatcatacgttgttgatgcaatttctcttgctgttcaatttgtgatgaaacattttgaagcgtaaatgcatgaattcccctgtcttgatcaatcaactgatatgttgctgtaaatggcatcactttttgatctttcgtcttcataaatacttggaaattcgtagcttgtacttgcatcgattctaagaaacagtctttacatgattgtacatcataggcatttgtatacccttcacatctgtgacaaatcgcattcgccacagcactgtaattatcttcttcagataatatatctttagcagcatcattcattgcaataattttaccgttatcatcagcaaaaactatcttttcgattgaatgctcataatattttttcaataaagtatctaactgtatactgtcctcattaatcatgacttacaccctaattcatctcattatttatcatcattgaaaataccaaacttacgttgaatatcatcattatcaaatatttttggtaaaggacgaccatctctttgaccaaataatagtacgccatacacttgattcttataccaaagcggcactgctaaaactgctgttaatgattcgctcaataaaattggatagtcaatcttttcttcaggccctaaagctaaaccaacattggctattaccatacgctttcctgttttcataacagttccagctaatccacgaccttttcttaaaataatcaatttaaatcgattatttttattacctgaaacatagtgccattttattggagatgatggtttgttagattcatagaaagcgattgccgcaaaatcataaccctcttctttgcgtattttatctaatgtctcttgaaatctacgatcttcaattattgcttctggtgtcaaatcctttcacctcttatgcttacactttattcttacggtaaataatatatctgcgatttatatatgtcaaaggtacactccaaacatgcaccaaacgtgtaaatggccaacaagccataatagtgaaacctaacaatatatgcattttaaatgcaatcggcacaccactcatcaatgacgcatctggttttaacataaataattgtctaaaccaaattgataatgaagttctgtagttaaagtctggatgttgtatatttgttactaatgttgcgtaacatcccataaatacgataagtaataataagaaatttacaaatatatccgacgctgaacttaatcttcgaatacttttcgtagtaacacgtctcgctgttaataaaaacatccctatcaaagttattataccaaagatgctaccaatataaacagcgcctatatgatataaatgctcagacacacccactgcatccatccatggtttcggtattaacaatccaactacgtgtccaaaaaacactggaataatacctaagtgaaataataaacttccccacatcaacctttttctttctattaattcactagatttagctgtccaagaaaatttatcataacgataacgtgcaatatgacctgcgacaaagacaactaaacataaatacggaaatataacccataaaaactgattaagcatgatgtttcactccttttggtgatgtcaaacataatttcaatgtttttctaagtgcttgaatcacataggcatatggattgttatcttcaccaagtgcattcgccatcacatatgttccatcctcaataatcataatgattaattgaatattctcttcagctcttggatcatttcgccattctgccacttgcaaaaattgaagcatcaacggtagataatcagaaagttcattatctaccatttctagtccaaacatttcatataatacctttaatttagctaacatttgcccacgttctttttgcgtatcaaatttgttatacgtcatatataatggtgcttttttcgtaaaatcaaatgtatctgtataaatcgctttgatttctgataatgaaaatgtcatcattacatttctaaatgctactaaatcttcatatgctggatgatctttcgaaattgtttcttcaaaagtttttggatgaaaagttaatttttctggaaaacataactgttgtgccatatatccaaaactttcttgatattttttaaaattatcgaaattaatcacggaaaatccctccatagaaattctcattataaatttcttgaccagttttccctgaacctactgcaacgccacagccttcacagttatctccaaaatgctcgccgccgtaattgtatcctgtactaccttgtgcgtgatacgtatctaaataggtttctttgtgtgatgttggaataacaaatcgatcttcatatttggctagtcctaataaacgatacatgtctttagtttggcgctcggttatacctaatcgctctaatcgagacgtgtcaaatggctgttgagtaacttgagatctcatataacttctcatcattgccatacgttgtagggctccttttactggctctgtatctcctgcagtgaaaatattagctaagtattcaataggtaaacgcatttcttcaatggctgggaaaatcgcatctggattttgagttgtatttttaccttcaaaatagctcataattgggctaagtggtgggcaataccaaaccatcggcatcgttctaaattcaggatgtaacggaaatgcaagtttatattcaattgctaacttataaattggagagttttgtgcagcttcaatccaatcgtaaccaataccatctttttcagcttgagcaatgacttcttcgtcaaatgggtttaagaatatatctaattgtttttcatataaatctttctcgtctactgctgaagctgcttcatgaaatcgatctgcatcatataataaaacacctaagtaacgcatacgtcctgtacaagtttcagagcataccgtaggcatacccgcctcgattctcgggaaacagaaagtacacttttcagctttgttcgttttccaattgaagtaaactttcttatatggacaacctgtcatacagtaacgccatccacgacatgcgtcttggtcaactaatacaatgccatcttcatcacgtttatacatagcacctgaaggacacgatgcaacgcaacttggattcaagcaatgttcacataaacgtggtaaatacatcataaaagtttcgtcaaattggaatttaatatcttcttctattttttggatgttaggatcttttggacctgtaacatgaccacctgctaagtcatcttcccagttaggtccccattcaatttcaatgttatcccccgtaatttctgaatacgctctagcaactggcgaatgcttccctgatttcgcagttgttaaatgttcataattatagttccatggctcataataatctttaattaatggcatatctgggttataaaaaattttacctaaagcaatttttgaaattctacttccagattttaattcaagtttccctttacgatttagtacccaaccacctttgtagtgttcttggtcttcccaacgtttcggataccctacacctggcttcgtttctacgttgttgaaccacatgtactcagcacctggacgatttgtccaagtgtttttacatgtcacactacacgtatggcatcctatgcatttatctaaatttaataccatcgcaacttgcgctttaatcttcaagccaattaacctccttcatctttctaactgctacatataaatccctttggttcccaattggtccataataattaaagtgataactaatttgtgcgtatcctccgactagttgtgttggtttcaaatggattctagtcggcgcgttgtgtgaaccaccacgtgtatctgtaatttctgacccaggcgtttgaatatgtttatcttgtgcatgatacataaacattgtacctttaggcatacgatgcgaaataactgctcttgccgttacaacaccattacggttatacacttctagccaatcattatcttggatatcgtgtttttcagcatcttcatttgatatccaaaccgttggaccacctctaaatagtgtcaacatatgcttattatcttgatacattgagtgtatattccattttccatgaggcgttaaataacgcagtaccaaagcatctgtaccacctttaattttcttatctctattcccaaataccattggcggcaatgtcggtttatatactggtaagctctccccaaattgttggaaaacttcgtgatccacataataactttgacgtcctgttaatgttctaaaaggtactagacgttctatattcgttgtaaatggtgaatatcgtcgaccttgtttatttgaacctgggaatactgctgtcggtattacttctcgtggttgtgaagttatatttaaaaacgaaattttctcagcagcgcgttcgctagaaatatcttttaacggcattccagtttgttcttcgagatcttcatatgatttttgtgataatttaccattcgtagcagatgaaatacttagtattgcatcagctacattacgtgctgtatcaatacgtggacgattcgctctcacagaatcatcatttgtatcactccacgtacctaacatactttttaattcttcatattgttcactgacaccgaaacttacaccatgtgctccaactttccctttttcaagtacaggaccaagcgtgacatatttgtcgtaaattttagtgtagtcgcgttctacaattgcaaagttaggcattgtacgtccaggtaccgcttcaatttcacccttcgaccaatctttcactacgccgtatggtgttgaaatttcttgctttgtatcatgactaagtggagttgtcacaacatctttaaacgttccaggtaaatagtcttttgccatttctgaaaatgcttttgccaacgttttataaatatcccagtctgaacgcgattcccataacggatcaatggcaggattgaaaggatgtacatatggatgcatatccgttgatgataaatcatgtttttcataccaagtcgctgccggcaaaacaatgtcagaatataacggtgttgccgtcattctgaagtctaaagagaccactaaatctaacttacctgttgtttcttcacgccacgtaatttcttctggcttttcatcttcatttggtgtagctaataaccctgattttgtgccaagtaaatgcttcataaagtattcttgaccttttgcagaacttgaaattaagtttgaacgccatataaataatgattttggatgattctttttcaaatcaggatcttctattgcaaattgtgtttgttttgatttcacttcatcaattgcacgttgcaaaatcgcttcatttgaatctataccttcatctttagcttcttctgcaaacaacaaactatttttattaaattgtggatatgatggtaaccaaccaagtctagctgctaaaacattataatcagctggatgttgatgctttaactcctctgttttagctaatggagattttaaacgatctacatttgactcttcatatttccattggtctgttgcaaaatagaaccaacttgttccgttttgcaaacgtggtggtccttgccagtctttcgcaaatgcgacagtactccatccttcaatcggacgacatttttcttgtcccacatagtgagcccaaccgccaccgttcacaccttgacagccacataacataactaagtttaagattgaacgataaatcgtatctgagttaaaccaatggttaatacccgcacccatgataatcattgaacgcccttcagtatcgatagcgttttgcgcaaattctttcgctacttgaatgacaacactttgttttacgcctgaaatggcttcttgccaagcaggtgtatattttgattctgcatcgtcgtatccttttgattctaatttatgatcaaaacgacgcacgccatattgacttgccattaagtcaaaaattgtagcaatacggactttgtcaccatttgctaaagtgacttgtcgagttggaattggacgattgaatatcccatctccatcactatcaaagtatgggaattgaattgtttctaattcgtatccaccttctgtcattgataatgtagggttaattttagaaccatcttctgtttctagttttaagttccacttcttaccttcttcccaacgttgacccattgtgccattaggtactactaaactatcgctgattgcatcatgaataactggcttccattcgccttgctctgttgtttgacctaagtcactcgctcttaaaaatcgacccgctttatatccattttcatcttcatccagcatgataagaaacggcatatctgtatattgtttagcgtaatttataaagcgttcattaggttgattaacataatgttcttgtaaaataacatgcgtcattgcttgtgcaattgcagcatctgaaccaggattcggtgctagccagttatctgcaaatttcacattttctgcgtaatctggtgctactgaaatgacttttgtacctttatagcggacttcagtcataaaatgtgcatccggagtacgtgttaaaggtacattagagccccacataataatgtatgatgcgttataccagtcacttgattcaggcacatctgtttgctctccccaaatttgtggagaggcaggtggtaaatctgcataccagtcataaaaactaagcatttcaccaccaagcaaattgatgaatcgagcacctgctgcataactaatcattgacatcgctggaataggtgtaaatcctgcgattcgatctggaccatatttttttattgtatacagtaattgtgctgcgattatctctgtaacgtctttccaatttgaacgcacgtgccctcccatacctcgggcttgcttatattgtttggctttgtcttcattttcaacaatagacgcccatgcagcaacgcgattaccattgttttcttctaatgcttcagtccataaatcccagagttttccacgaatatatggatatttgattcgaagcggactgtattcataccaagagaatgacgcacctcgtggacatcctctcggttcatattcaggcatatccggaccacaacttggatagtcagtttgttgattttcccaggtaatcacaccatttttcacaaatactttccaagaacatgagcctgtacagttaacaccatgtgttgttcttacttctttatcgtggctccaacgttctctgtacattttttcccattctctacttttactttctaggatcgaccaattcccattaaatttttctgttggcttaaagaaattcaatccaaattttcccatatttatatcctcctacgtataaaaatacgatgtgtagatgtcgtgtttttaaatactttaaaatgcccaagactattgctttaattagattgtacattttttcacaaacataaaatattagggaatcacctaattacttaaggaatttccctatcaataacgggatttcattgaaataatacacaatcatgtatggtcatgcttattgccaatctaaatcgttcaaatttggcacaacgacaaataaggcttcaacacgaatatattctctcggttgaaaccttacttattcatttattttttataaattagtgacataacactgtattagcatctgcacgatcggttgaaatatatgttacattttcttgctgcttaataaatgcatcatagtaatcatattgcgacgaatgatatgtgccattcgatgtatcatttgggtttagcaaacagccataaccttcgtcatataaatgttcacagagcataagggcgtcatgtttagaaccacttactacataaaattgcttcataggatcatatgatttaggagtgttttcagtataatcaacaacttcccctataatacatatacctggtttcgcctcaattgaatagtgttgcaattttgaaataatattacttaaacgccccttaacaacaaactcgttaaaacacgatgcttgaaagacaatcgctatcgggtaatcaatatctgtgtattgttgtatctgtgtgataattttccctaaacgttttacccccatataaattgctaacgtgccaccattcactaaggaattgacatccacttcattttcttctgaatctttaaagtgacctgtagaaaatgtcacacttttagcaactgtacgcattgtcaaacctgtctgcatagtagcaactgctgcgctcgctgatgtcacccctggtacaatttcaaacgcaatatgatgttcatttagtgtgtcgacttcttcttgcacacgaccaaatatcgctggatcgccacctttaagtctaacaaccttgttatatcgacgcgctgcttccacgatacagtcatttattttttcttgctgaatatgttttgcatacggctttttaccaacatcgataatttcagtagtcaaattcgcatattgtaaaattaacggattcactaatcgatcatatagaatgacatccgcttcacgtattaaacgctcagcctttttcgtcaaataattcggattacctggacccgcacctatcaagtaaaccttgccatattcctctacagacatatatatacgttcccgtctgtaacttctacctcataaacatctacacaaccttcatcaggttcttgaacaatacctgtatttaaatcaattttttgatcgtggagcgggcaaaatacatattccccactcactgtcccttcagacaatggtccttgtttgtgtggacagatattgtgaatcgcatgaattttgccactttctgttaaaaacaaccctacctctttgcctttgacaataaccttttttccaattaggggtgttaattcatctatagttgtcactttaattttttcttttgtttccatgtattacaccttctccacttcaaaaattctacgtgcttgcgcattgctagttattgcttcccaaggttcagcttcgactgcttttttagcatccataatgcgttcaaatagttcattttgtctttctgggtcaagtaagacttcttttacattttcaaatccaagtcttcttaaccatggcgctgttctttcagcatatatacctgtttcgcgataatattgcatcaaagcaccacataatttgattacttcatcttctgtttctacagttgttaaaaattcagctttttcaacttctgtaccaccattaccaccgatatagatttggaatccattttcaactgagataataccaaaatctttaacacctgattcaacacaacttcttgggcagcctgatacacccattttgaatttatgaggtgtatcgatgtattcaaatgttttttctaaacgaatgccaagtcgtgtcgtgtattgcgtaccaaatcgacaaaactctttaccaacacagcttttaactgagcgtgttttcttaccataagctgatgctgaacgcatacctaggtcttcccatatatttggtaattcttcttttttaactccatacaaaccaacacgttgtgaacctgtcactttaactagtggcacatgatatttcttagccacttctcctagacgaatcagttggtctgcatctgtaacacccccacgcatttgaggtataacagaaaatgtaccatcattttgaatattcgcatggtaacgttcgttagcaaatcttgattctctttcatcttcatgatcatgtggataaaccatgtttaaataatagttgattgctggtcgacattttggacatccacctttatttttaaagtttaaaacatgtcgaacttctttagatgtttttaaacctttcgctcttatttgcgttactatttgatcgcgtgtcaaatcagtacaaccacatataccagcaggttttgcggcaacaaagtcatctcctaaggtgtgctgcaatatttgagcaatttgcggtttacatttaccacatgaattccccgcttttgttttagccgttacttcttcaactgttgtaaagccattttccgtaatcgcatttactatagtacctttatcaacaccattacaaccacaaattgtttcatcatcagccatatcagcaattgatagcgatgcctcttctccacctttagtaagcaatgatacaagtgtgtaatcttcagtggattcaccttttttcatcatgttataaaagcgtgaaccatcatcgatatcaccatatagtactgcaccaactacattaccgtcttttaaaaagatttttttatagttattatcaacactattaaatatttcaatacctttaatttctgcattttctacaatttgaccagcactatacaagtcacacccagaaacttttaatgacgtaaatgttgttgatcccttgtatccgttcgtttctttatttgttaaatgatcagctaatactttaccttgttcatatagtggtgcaacgagtccataaactttgccgttatgttctgcacattcaccaactgcatatacattgctatcacttgtttgcatcacatcattgacaacaataccacgattaacatctagacctgattctttggctacttctgtgtatggtcgtatacctactgccataacaactaagtctgccggaatctcgcgtccatcagccaatttaacaccctcaacatcatcttctcctaagatttcagttgtgttggcttgcatttcaaacttcataccttgcttttctagatctgctttaagcatatttccagctttacggtctagttgcatttccatcaaccattcagctaaatgtaacaccgttacttccataccttgatctaataaaccacgtgcacactctaaacctagtaatcctccaccaattacaattgctttctttttagtcttagcaatgttcatcatttgttcagtatcatcaatcgttctccaaccaattacactcggtaatgtcgaacctggaactggaatgacgaatgctttagaacctgtcgcaaaaatcaatttatcgtatgatacttcaataccatttgcagtagtaactgattgatttgctctatctacttcaattacaggatcatttgtaattaactcgataccatgttcctcataccactcatatggattcataattgtttcttcaactgtcattttattttgtaaaatatttgaaagcatgatgcggttatagtttggataaggttctttacctattaccgtaatatcatataaatcgttggcgcgctctaatatttcttcgattgttcgaatgcccgccataccgttaccaatcattactagtttttgctttgccataaaatatgcccctttactccataatatttatttcaaaaaaaggtattaatttttcgttagtgcttttatattttcattggaatcattaagctttctaatctatcgttaatgatttgctttaaaattgggtcgaagttaattgaaggtgtgaagtgtatatctgtattaataaccatgtcattcatttgctgcttcactttgttaacaagtcttccgtcatataaaaataatggtacgacaatcaatttttgataccgtttcgagatgctttctaaatcatgtgtaaaactaatctctccatatagcgttctcgcatatgtcggcttgctaatttgcaaattttgagcgcatatttgtaactcttcgtgtgccttagtaaactttccattaatattgccgtgtgcaacaaccataactccaacttgttgttcgtcacctgctaatgcgtcacaaatacgttgttcaattaatcgtctcattaaaggatgtgtgccaagtggctcgcttacttctacctttatgtctggataccgtcgtttcatttcatgaacgatattcggtatatccttgagataatgcattgcactaaagattagcaatggtacaattttaaaatggtcaaccccactttgaatcaacgtcgtcattaccgtctctaaatcctgatgctcactttctaaaaacgcaatatcatagtgatgtatatcatcttttactaattcagaaataaatgcttctaacgcttgattctgtcgtccgtgcctcatgccatgtgcaacaatgatattcccattcacatttaccaaccctttcacacgtattgtataccaaatcattttgtttttgtgaaaagaatcacattataatgtaaaatcagggaattccctgatgcctgtagtcatgcatattccttatacattttccctttttgttaaatcaaaaaaagcgaccgatatatgaatccctactcaacatttatttgagcaagcattaatatatatcggtcgcttgtagtgtatattattatcttaaaatggtggttggcctaatattgtttcgtcaaagcgctcgggtatcaatactttgcgcatgatcacacctaaatcgccatcatcattttcatgttcgctgtatatttcataacctcttttttcataaattttaagtaaccacggatgcaatcttgcagatgtacctaaagtaactgccgctgactttaacgtatctcgcaaaaatgcttcttcaacataagtaagtaattggctaccatagcctttccctttatactcaggatttgtcgcaaaccaccagacaaaaggataacccgaaatacttttcacacttccccaaggatatctaaccgtaatcgtagatataatttcatcatcaattgtcatgacaaatgtagtatttttatctatattttctttaacagcatctaaattagcattaaccgaaggccaatcaatacctagttctcttagaggcgtaaatgcttcatgcatgagttgttgcaatttttctgcatcttgttcacttgcgagtcgaatcatcgtttttgtcatattaatccccactcttttttaaatgatttaaccatattttatttttaaaataaatatccatcaaagtgtatcaataaatttatcacatgtcagaaagtatgcttcatctgaatacaccaatactctcatgaaacttattaaaaattactctctcaacgtaaaaaaccattcaaattcatgaatggtttggaagaatgattcattgttacgctatttaatcactacatcttaattattgttgctctaaacgattacgcttaccatttaagaaagcataaacgagacctacaaaaataccgccaccgacaaagttacctaagaaagcaaaaacgatattttttaaaacgtgtaaccatgaaactgcatcaaggttaaagaataccatacctgcatatagacctgcattgaacacaacgtgctcatatcccatgtatacaaagaccacgacaccacaagctatgaagaatgcctttgttaagccgcctttgaattgcatagagatgaaaataccaatattaataaagaagttacagaaaataccttttgtaaaaatattcaaccatgttgaatcaacagtctttttctgaactaaagctgttaaagcttgtgtcatttcaggtgtcatgacatgcgcaaatttcattaagaaaaataacacaaacccacctaaaatatttcctaagaaacaatataataaaatccaagtcatcttcttaacagaaacgactttataataccagcctactgtaaagtacatgaagttacttgttaataattcagagttagttaatacaactaaaatcaaacctaaactaaacgcaatggctcccattaaattgataagtccatctacgtgagtactcgcaaactgcgtctttattccgaacataaatacagtaacgattgagagtaaaaatccggccatcattgctttaagcatatatcggccaggtgtttgctgtaccattacttgcttcatttgtactgaagatgatattgaatcaacaattgcgcctgttgaatatgtatcttcaactgttttcttattttctatcacagtacttcccccatttactttgatcaaataaaatttactttctaattatattagtaaatcaatgtaattgatagattaaatttcagaaaaatctttttattctctcgaaaatgtagttttctttcataaaaacagcgagataaatcgcgtgattggctaatatctttatgatttaagatattacgacgctcattttatctcgctttatgtaaagtattacttattcttttttaaatttgaaaagtaatgtaaaccatatgcaaatacactgtaaccaattgcagtacgtaaaataaaccttataactttattaggtacacattttgacgttactgaaatagaagatagtagtgttgtgaaaatatataatattaaaactttgatataacgttctaccatcgaatcatccctcatttttataatattacaagattattataaaccgaatgaaacaaaaaagtttttacatattttcaacaactttatttcaataaagcatcaagttgatctaaagtttgattcataccttgttcaacacccatgtttatgacttgttgagcggcttcttttgttggaaataccgatgttgatgtcactgtcgttttcgttgtattgctcttggaaaatgacaaagtaattttcatgcttggcatttttgtatcttttgcaccttgaggtgtcgcaaatgagtcaatatattcaattaaatatggacgcttaaccgttttatattctgctaatgtatagctggtcattgtaggtgttttaatcgcataaaatgcatcaccgcctgaaacagcattaaagcgaaacactttggtactagcgtcttttggatgaaaccatttttcaaataatgcttttgtcgtataggcatcaaacaccttttcaatcggtgcttctatcgttcttgaaaaaataattttattatcttcaactttaatcgtcatcttcccactccctatcttttatatttactcatcttaacatgcattgagtaacatatgttaccaaatcatttgttataaactatagtaatattaatcattccctctgttgaaattgataactacgaaataaaaaacacactctattcagctattaacagttgagtagagtgtgcaaacctgttgaattaatgcgctaacatttcttctttgatttggtctttatttaattttgaaggataatatgttggccagttatccatttcttttaataacgcgtcattatcattacccataaagatatggaagtgttctgcctttttaggtgcaatgttgtgatcgctaaattggatgaatttcggtaagtctttatcattaccatcgaccaatttaaacataaatctcacgccacggttacctttaggatatttcaatgttttcttaccattgtattcatatttaccagtgtgtttcttaccatctttagtaaatgtaatttcatttccttttatatcaatgttagtaatatcagttttatatcctttgtcataataagcttttaaatctttagcagatttcttcggatcattttcagctttatgttccatcacttcatcaagcgtaccgtcttttaagtaagggtaaacagattgccattcaccagcataatcgcttaattcacggtctttaacttgctcatctttaaaatacccatcagaaattgctttgtcatgtttactttcagctttgtcgtctttcactttaacaccactgtctaaagctttaccgatattttcaatattagatttcattaatgattgatacgtaatattatcttttttctgttgttctttatttaaagactccatgttgtagaattttaaaggcttcgcatctgtttctttacgaattgtttcagtcactttattcgcaacattatcttcgtaaagaatatatttagcattgctatctctaatttctttaacaattttagttaattctttttgtgatggatcttcagcattcatgttttgaatacctttttgaacaaaaccataacaatcagctaagtatccaattgattcatgtgaaatgaatactgcattaccttgcttatcttttgtaacttgcttcatatcgttatcaattttcttaagatcgtcgtttaattttttgtagtttttctcatagtcatctttatgttttggatcttttttcactaattcatctttaatttctttagcgaaagtttggttaattttaggatctaaccatacgtgtggatcatatccaccatgatgatgatgatgttcttctttctcatgatcatgtccctcatgttcatgctcttcaccatgctcgtgttgatcagttaaaagctttgctttatctaatttatcctctaaagacagttttttatctttatctttgatagtagatgcaactttcttagcaaccggatctaaattatcccctgtatacataaacaagtctgacttgcttgcacttaatatatctttttgtgttggttcatagctatgtaaatctgtccctgctggatagattgatgataccttcacgtgttttccaccaatttgctctgcaaatgattgcaatggataaactgtcgttttaattgttaccttgccatctttatcttttccatcatcattcccacatgcggctaatgataaagttacggctggtacaagaagtaacatacctaatttctttttcatagtcaccctcctaaatagtaatctttacgttttaaaattatatactcatgctacttaaaatacaagcactgtttttataaataatataaagtcgaatcatactttaggtatttaccacttttcgttttatctaatacatgactattgtacaaatatgatacagaaaactttatagtatttacgaacgtcataatataagaaaaaaagacaatctctatcatattgctaatagaaattgccttttcatattgtcctaaaataacttaccctatttttatagtgtgacttttagatttaataatggtatttacatgatgctatttttatatgattgtcatctactgtataaaccaatctatgttcgtgattgatacgtctactataatacccagtcagattcgattttaacttttcaggcttacctataccttccaatgcaccatttctgtcaatacttttaagtaactcattaatcttcttcaccatttttttatcgttctgctgaaaatacttataatcttcaaaggcttgaggcgaaaacgtaatatttaacctagccattatacatctatatctttcgttatagttttcccacgttctagatctgcaattgattgagctaagtgttcagcattatttgggttctgttggaggtaaagtgtttccatcatggagttataatctgattctgacatgattactacgtttttatcatcagtagatgttacagttaccatatcactatcatcatttacttttgtcataagtgcctttaaattctgtcgagcgtatgaataatttttaataatcatatttatcgcctccttttaacacacctcaattgtacaaatatctgtacaataaaacaagcgacacagaaaaaaactactaatcaagatttcgcacggggaagaatcaatacctatcctgtactgattccctactaaacaatgtttacatgataatttccacctatttagacttcatacattaaaaagacaatctctatcatatcgctaatagaaattgccttttcgtattgtcctaataaattggtatcacttactgatctcaacaattaagactatttgattttatcttttaataacttctcataactttcataatcatatggatcttcaactttctcgccattaataaatgcagttggtgtcgtttttatatgattatctttcgctatttttttatctttctctgcagctttccaagacttgctatcttttgtcttgtaatcttttataattttattttccgtctctttatctaaatgcagttgtttaatatgtttatctaatagttcttttgttaaccattctttattttcatcttgctgggcagcaaataattgcttttgaaaatctaaaaatgatttaggtgcatacatcaatactgcatgactcgcacgcgaaccaacaattgagtctttacctaagaaagctaaattgacaaattggtattccactttgtgattatctatataatttttacgcaactttggcatgactttttcatctaattctttacaataaggacatttatagtcgccatatacgacaactaatggtttgccgtttttcgaagatgtcgttgctgattcttttttaccgcaagctgttaaaattaacatgctcactataaataatgttagtaattttttagtcataataactcctattcatatctagttcgtcatattttcttcatgataatccgcatcatgttgttgataatatcgtctcgaatcaaaatcttgcttatatgatacacgtttatcactaaaatcatatgcataataatgcacttcatcatcattactcaaaggtttataagctaaaatgataattttatccttatcatagacataaatattagcatctttgcgttcaaaatgatcaacacgatcaccgttgccttttttggcaagttgttcttgtttttgattttgaattttaactgcttcatctatttctttcacatatttatcattaccacatcctgatataaagactagtaataataataccgtcgccacaaatcgcttcaatgctcccactcctactatcaacttccaactaactttcaatataattaatactatacaccgtcaaacattaatgcgctacaactactaccaatgcatttaatataaatatccaaagaaataacagttatgtatagtcaaagaaaaatatatttcattttctatgtgtatttgtaatcagtttttgataaaataaaaaaatagcattattaataaattcaaaaattatagttcaattcagagagggatgggataaaatgaactttgtaacgttgacttcggatgagttcaatgcgtttacaacaaagcatttttcacattacacacaatcagctattcattacaatcatagagttgatttaaaaggcgatgtgcatcttgtaggggttaaagatgacaatggtcaagtgattgcaggatgcttattgacagaagcacgcacacttaaatttttcaaatatttttatacacatcgcgggccagtgatggattatacaaatcaatcattagtagcatttttctttaaagcattaacgtcatatttaaagaaacacaattgtttatatgtccttgtagatccatatttaattgaaaatttacgcaatgcagacggtgaaattgttaaatcttatgataaccgagcatttgttagaacaatggataaattaggttataaacaccaaggtttccctgtaggttatgattcaatgagccaaatccgttggctgtcagtgttagatttaaaagataagactgaagaccaacttttaaaagaaatggattatcaaacgagacgtaatattaaaaaaacatatgatattggtgtcaaaactaaaacgttaacgattgatgaaacgcaaacttttttcgacttattccatatggctgaggaaaagcacggtttcaaattccgtgagttaccatactttgaagaaatgcaaaagttatacgatgaccacgccatgttaaagttggcgtatattgatttaaacgagtatttaaaaacgttacaattaaagcaacaacaattaacagctgaactctcaggtgttgaagaagcattggaagaaagtcctaattcaaagaaaaataaaacgaaacgcacacagctagaacaacagctaaatagcaataagcgtaaaatcgacaatacaatagaacaaattgaacaagatggtgcagtcttaaacttagcttctgctttatttatctacaatgagcatgaagtttattacttatctagtggttcaaaccctaaatataatgcttatatgggtgcctaccatttgcagtgggaaatgattaagtttgctaaagcgcatcatattgatcgctataatttttatggtattaccggtgacttttcagagtcatcagaagactatggcgtccaacaattcaaaaaaggttttaacgcacatgtagaagagtatatcggtgactttattaagcctatcaaaccattactatataaggtacaaacgtacttaaatcataaacgtcgttaaaatatcgctccaagattatgacaacataacaaagaaccacgcatcatgtatatggcttcatcgccatactaaaacatgatacgtggttctatttgattattcttcatttataacatttaagaaacgtcttaattcttctgttttcggacgattgaacatctcttctggagccccttgttctccgatcatgccttcatgaataaatacaatgttattagatacttctttagcaaaacgcatttcatgtgtcacaatgaccattgtcatgccttcattagccaaatctttaataacctttaaaacatcattcacaagttcaggatcaagtgcagatgttggttcatcaaacaacatcactttagggttcattgctagtgctcttgcaatagcaacacgttgttgttgaccacctgataatgcatgtggacgttgatctttgacatgtgttaaaccaactttctcaagtaactcaagtgatttcccacgtgcctcatcctttttcaactttttaactgtgataagaccttccattacattttctaatgccgtcttatgcggaaaaaggttataactttgaaataccataccagactgtttacgaacttctatttgtgattttttatctttagatgtatatgttttgccgttaacataaactgtaccttcagttggaatttctaatgcattaatcatacgtaacaatgttgttttacctgaaccagatcgaccgattaaggttacaacctcaccttgttcaacagataaatcaatacctttgatgacttcaacatcattaaatgatttatggatattgttcaattgaatcatgagcgataccctctttcaatataagattcatagataccttggataattgaaataataaagcataccacccagtacattagcgcaactaacacataaattgttaaatattcatatgttgtagacgcaacttcttgagcttttctaaacatttcagccactaaaataaatcctaataatgatgtatctttgattaaacttaaaaatgtattacctagtgcaggaatcgacactcgaattgcctgcggtaaaatgatacgttgtatcatttgaccatacgtcataccgatggaatatgcagcttctgtttgtcctttcggtatagaaataataccgccacgaataatttccgaagcatacgcacctacatttaatgataaaccaataatagcagccactacaggtgccaatgtccattggttgtcagcgtcatttgttaataatctacctaattctggaataccataaaatatgataaatagttgtactatcattggtgttcctcgaataatagatacatagacacgtgaaatacttcttaaaattttactcgttgaaattcgcattaatgctgtaaataatgcaataatcaatcctaaaacaaatgtaactaatgtaataggaattgaatatttgaccaaaccttctagcataggtccgaaagcttgttttgcagcatctagtgcatgttgttgttcgctatttagatttagaaacatcttgaccaaaccatttcttacctattttagctaattcaccgttttcctcgatttttttcaagccatcattgaatttttgaactgtttcatcatctgcttttttagaaaatgcaaatgcagatctactttgttcagcattacctttgattgctttgatcttagcattaggtttttgttttttataatccaagtatgacagactatcattaaatgtaccatcaacacgcttagacaataataaatccattgattggttaaagccatcaacttttgtaatatcagcacctttatccttagctaatttaccataattagatgtgaatgtttgtgctaacttcttacctttaacatcatcaaaatctttaatatctttttcattttcacgaataactaaaacagcacttgagaatgtgtaaggcttagaaaatttatatttcttttctctatcaggattaatacctacttggttcgcgattacatcaaaacgccctgcgtctaaacctgcaaacatagaatcccaagaagtttcattaaatttaagttttaaaccttcttctttagccactgctttaataacatcaatatcgtaaccagttaatttaccatctttatcgtggaaactaaatggtgcataagtcccctcagtcccaacattaattgtcttgctatctttactagcttccttgtctttcgacgaattgtttccgcatgcagccaatatgaaaacgaaagctatcatcacaaataaaagtcttttcatagaatatatctccttattcttattattctaatcggaataaaaatattttaatctgaaatgccggataagtcaatatgttgaacttttgctaaaaagctttatatagctagcaacttatatttattgacgagaatcaacttcttttttcttaccttgtaacataaatgaacaaaagaaactaacaactgtaatcaataatgcaaataaaaatccagcgtgataaccatgcaacatcgtatcaactttaatttgattcatcatatcaattttgttcatgccattatagtctgacatagttggagaaaagtttttgcttgcatgggataaaatagtaattaatgcagctgttccgatagaaccagcaatttgttgtactgtgtttgtcatagatgaaccatgtgcattcatttctggctttaattgattcatcgtatgggtcattactggaattaatcctaacgcgataccaaccattcgaatcgcataaactgttgccaacatgattgttgatgtttgttcatccattacaacaaaataagccgtagtaataacaacaatcgccatacctactaaagcaagatttctaggaccaaacttttcatataaagcacccgaagtcatcgacataaatgccataacaattgctcctggtaataaagttaatccagaatctaaagctgaacgatgcaataaattttgcacaaagataggtaaaatcgtttccgaaccaatcatcgataccattgtgacacccataataatgataccaactgtaaattgtttatttttaaatacagcaaaatttaataatggtgttgatagccgatattgacgtaatacaaataatgcgactaaaacaacgcctccaatcatagatactaatacgataggattatcaaaacctttttctgaaattgaactcgttccatacaataacccgccgaaacctagtacagaaaaaatgacagaaataaaatcaataggtactttaattgtagttccaacattttttatcgttttaaatccaattaaaaatgtcacagctgcaattggagcgacaacatggaaaagcgatctccagttaaaatattcaacaaggtaacctgaaagagtaggtccaatagctggtgctaaaccaattaccaaaccaaatatccccatatatttaccgcgttcatgtggttggaaaacatccaaaatcgttgtcatcatcaatggcatcataatacctgcgcctaacgcctgaataattctagcaactaataatgttgcaaagtgcggactcaagccgccgagtaatgtacctaagaaaaagatagaaatacccactaaaaacacttgtcttgttgtataacgttgtataacaagcgcggacaaaggaataacaatcccattagtcaataaaaaagctgttgtcagccattgaacttgtgtatatgaaatttcaaaatctttcataatacttggtaaagccgtcactaatagtgtttcatttaataatccaaaaaatccacccatcagcatagtaataatcatcgttaatttttgtttcttcgacatttaaagcttccccctcaccatctaaaaaacgacacacatttttagatatccggtaattatacccattttccaaaaaattagcacgactttattacaatttctttaaaacgtaatcattactatttacatatgagtagttatcggtcataatatatttacaaggagggatagagatgaaattagatttacagactgctcgtcgtaatttaaatagccctaacattaaaacaagaaagcgtgctttaaagattattaagcaacataaaagagcgaaataattgttttaatttgactatattgtatgtctaactatattttcgagtatccctagctcgttaatataaactctatacttaactatttccttacattacttcacatatttaagagctgcatatacactcactccttgtgtacatgcagctctttttttataagtagtatttatctataacttctaaatcatccgttaattcataaacaagcggtgcacctgttttaatttcataattaatgatatcttcatctgacacatcttcaagatatttaatcaatgcgcgaattgaatttccgtgtgcagaaactaataccgtttgaccatctagcaaatattgtgaaatatgatctgtccaaaatggtatcactcgaactaaagtatctttcagactttcagaataaggcatcatacgtttatctaaatgattatatcgacgatcagctaagtaagcttcacgttgttcttcggtttcagcaggtggtttcacatcataagaacgacgccaaatatgtacttgttcttctccaaattcttttctagcatcatctttatttaagccttgcaatccaccatagtggcgttcatttaaacgccagcttttatatacaggaatccattgttgtttagattcagttaaaatataatgcgttgtatctaaagcacgtgttaataacgatgtaaaagctacatcgatggcaatgttattttctcttactttttcacctgctctagtcgcttcattaataccttgttcagataaattaacatcttcccatccagtaaataagtttttagcattccactcgctttgtccatgacgacataaaattaattttggcataacttataacctctttcctttaatctttaggacgttatttcagggatattttaagatgatttaatcttagtaattttcttttcaatatattttaaaattcaatgattaaatcaattatcactagacattaaatacataaatcctattccccattttcattttttaattcataaatgaatcaataaccacctaataacaaatcatattatacacctttgttcgctatttttctaaggtttaaaaaatatttttaggtaaacctaaaaatagatgtaataaaaacgcctcctcagatatttatatatctatgaagacgtttaaatacattatagatggtctggttctgggtgaacgtatactgaggaaataccttttttgtgcaaatgatgttcgacattgtcacaaatttgatgcgcttctactaaggaaaggttagcatctacaacaattgtgacatcaataaacacactacttccatggtaacgccctttaatacttttaacttcttgtacttcatcaacttctaaaatatcattgcgatacgcttctaattcagtttcattgaaaccatcactcaacataaaaattgcttctttaaaaataccaaaaccagtataaacgattagtaagcctagtaatgttgctaaaataatatcgacaattgggaaaccgatttgcgtaaaaattaatcctatcgctgttccaatgctgactaaactatccgataaattatctttggcagccgaatttaaagaactacttttcgttcttttcgctagtctttgattgactgcaaatacaatcaacattacaagaccactgattaagctgacgataattgttattgcgttaggtacaacgtcatcttctttgaacaaacgaggtgcattttgaataactacttggatacctacaaacataatgacaaatgacaccaataatgaagaaatattttcagacttcaaatggccataaggatgatttcgatcggcaggtttaattgaaattttcaatccaataataacagctaaagaaacgataatatctgtcatattgtttaatgcatcggctcttacagctgcagagttaaagacaaaacccgtgacatacttaacaatagataagattatatatacaattaaactcaaataagcaccgcgttgcgccaatttaagattttcattatgagacatgcgttgaaccaccttgaattagtatagtaacaatattatgaatgattcattttaattttacaacgtttttaatttttataaatttttataaaattaaactaatttattcattcgcaacccctaaaaataatttttagcctttctgcgaattttatgagctagaaaggcgcccaactctccctgtttgttaactttcgcctcgaaagtttctatgttgggaccctatgcattagtagcgaagctatctaatgtgttcctttattttctgcgaattttatgagctagaaaggcttatgcagttgacgttttacgtccaactgcgttcctccgtcttcttcaaatttatttgttagaaaggcacccaactctccctgtttgttaactttcgcctcgaaagtttctatgttagaaccctatgcatgagttgcgaagctatctaatgtcgtgaactaattatatagaagaaaaagtgcatcaatgacaaattaaatgagatttctactctaccaaactctcttcgaaagacaattttctcctctatttattagcaaactattgcatttctccatatagtacttccttacttaaaatacgctgaatgttctgaattaaacgcttttttacatagttaacactagttaatctattagttaacattagttaataattagttaatttccatttgtattctcatgtgataaattctaaaagcatacaataaatttaatatgtaaaaagaaagggaatacacatgaaaaataaatatatctcgaagttgctagttggggcagcaacaattacgttagctacaatgatttcaaatggggaagcaaaagcgagtgaaaacacgcaacaaacttcaactaagcaccaaacaactcaaaacaactacgtaacagatcaacaaaaagctttttatcaagtattacatctaaaaggtatcacagaagaacaacgtaaccaatacatcaaaacattacgcgaacacccagaacgtgcacaagaagtattctctgaatcacttaaagacagcaagaacccagaccgacgtgttgcacaacaaaacgctttttacaatgttcttaaaaatgataacttaactgaacaagaaaaaaataattacattgcacaaattaaagaaaaccctgatagaagccaacaagtttgggtagaatcagtacaatcttctaaagctaaagaacgtcaaaatattgaaaatgcggataaagcaattaaagatttccaagataacaaagcaccacacgataaatcagcagcatatgaagctaactcaaaattacctaaagatttacgtgataaaaacaaccgctttgtagaaaaagtttcaattgaaaaagcaatcgttcgtcatgatgagcgtgtgaaatcagcaaatgatgcaatctcaaaattaaatgaaaaagattcaattgaaaacagacgtttagcacaacgtgaagttaacaaagcacctatggatgtaaaagagcatttacagaaacaattagacgcattagttgctcaaaaagatgctgaaaagaaagtggcgccaaaagttgaggctcctcaaattcaatcaccacaaattgaaaaacctaaagtagaatcaccaaaagttgaagtccctcaaattcaatcaccaaaagttgaggttcctcaatctaaattattaggttactaccaatcattaaaagattcatttaactatggttacaagtatttaacagatacttataaaagctataaagaaaaatatgatacagcaaagtactactataatacgtactataaatacaaaggtgcgattgatcaaacagtattaacagtactaggtagtggttctaaatcttacatccaaccattgaaagttgatgataaaaacggctacttagctaaatcatatgcacaagtaagaaactatgtaactgagtcaatcaatactggtaaagtattatatactttctaccaaaacccaacattagtaaaaacagctattaaagctcaagaaactgcatcatcaatcaaaaatacattaagtaatttattatcattctggaaataatcaatcaaaaatatcttctctagttttacatcattttttaaataattttcgtaacaaaccgtgattaaaaagaaccgttgattctcaatcgaatctacggttcttttttcattttccatcaattaaatgcttcttcgctatttgtcagcccacttttttacctgcaacttgttaaataatccttacatcgttaacgaatagttcatcatttagttgaatcagctcaactttattaacttcatattttcacaaactattgcgcaatccattccttttccactacaagcaccataattaaacaacaattcaataaaataagacttgcaaagcatagttatgtagctatataaacgcctgcgaccaataaatcttttaaacataacataatgcaaaaacatcatttaacaatgctaaaaatgtctcttcaatacatgttgatagtaattaacttttaacgaacagttaattcgaaaacgcttacaaatggattattatatatatgaacttaaaattaaatagaaagaaagtgatttctatgattaaaaataaaatattaacagcaactttagcagttggtttaatagcccctttagccaatccatttatagaaatttctaaagcagaaaataagatagaagatatcggccaaggtgcagaaatcatcaaaagaacacaagacattactagcaaacgattagctataactcaaaacattcaatttgattttgtaaaagataaaaaatataacaaagatgccctagttgttaagatgcaaggcttcattagctctagaacaacatattcagacttaaaaaaatatccatatattaaaagaatgatatggccatttcaatataatatcagtttgaaaacgaaagactctaatgttgatttaattaattatcttcctaaaaataaaattgattcagcagatgttagtcagaaattaggctataatatcggcggaaacttccaatcagcgccatcaatcggaggcagtggctcattcaactactctaaaacaattagttataatcaaaaaaactatgttactgaagtagaaagtcagaactctaaaggtgttaaatggggagtgaaagcaaattcattcgttacaccgaatggtcaagtatctgcatatgatcaatacttatttgcacaagacccaactggtccagcagcacgagactatttcgtcccagataatcaactacctcctttaattcaaagtggctttaatccatcatttattacaacattgtcacacgaaagaggtaaaggtgataaaagcgagtttgaaatcacttacggcagaaacatggatgctacatatgcttacgtgacaagacatcgtttagccgttgatagaaaacatgatgcttttaaaaaccgaaacgttacagttaaatatgaagtgaactggaaaacacatgaagtaaaaattaaaagcatcacacctaagtaaacagttcaatcatcttaaaaaatcctgggacacttcatacttgtctcaggattttttaacaaattgaatcagcctcataacattaaattattttatcgtacattaaatttaataataacaactgatttttataagaataaagtatcgaaccatagtagatacacaaataatacaaatgaaacaatttaacttgaaagcttaaataaatattatcaagttaataaacaattaatttttagatggattcatcaaaaatcgtaaaaaagcacaatttgtattttacaaacattaattaaaaaagaaagcaagacattcgtgcaatcggttaccttaaattgtttacaactgtcaacaataccaaggttttattaactatatttctcacaaaattagcttttagcattccaaacaaaaaaggttaaatcgaacggaattatggcatttttaacttaattgtaaaaaaagttgataatggtcaattgttaatgaacagttaattataataacgcccaaaatatattattatttaattaagttaaataaaattatagaaagaaagtgaaacttatgcttaaaaataaaatattaactacaactttatctgtgagcttacttgcccctcttgccaatccgttattagaaaatgctaaagctgctaacgatactgaagacatcggtaaaggaagcgatatagaaattatcaaaaggacagaagataaaacaagtaataaatggggcgtgactcaaaatattcaatttgattttgtaaaggataaaaaatataacaaagatgctttgatattaaagatgcaaggattcattagctctagaacaacatattacaactataaaaaaactaatcatgttaaagctatgcgatggccattccaatataatattggtttaaaaacaaatgataaatatgtttctttaattaattatttacctaaaaataaaattgaatctacaaacgtgagtcagacattaggatacaatatcggtggtaatttccaatcagccccatcactcggtggtaatggatcatttaactattctaaatcgattagctatacacaacaaaattatgtaagtgaagtagaacaacaaaactcaaaaagtgttttatggggcgtcaaagcgaattcattcgccactgaatcaggtcaaaaatcagcctttgatagcgatttatttgtaggctacaaacctcatagtaaagatcctagagattatttcgttccagacagtgagttaccacctcttgtacaaagtggatttaacccttcatttatcgccacagtatctcatgaaaaaggttcaagcgatacaagcgaatttgaaattacttacggaagaaacatggatgtcactcatgccattaaaagatcaacgcattatggcaacagttatttagacggacatagagtccataatgcatttgtaaatagaaactatactgtgaaatacgaggtcaattggaagactcatgaaatcaaggtgaaaggacagaattgatatgaaaatgaataaattagtcaaatcatccgttgctacatctatggcattattattactttctggtactgctaatgctgaaggtaaaataacaccagtcagcgtaaaaaaagtcgatgacaaagttactttatacaaaacaacagccacagcagattctgataaatttaaaatttcacagattttaacatttaatttcatcaaagataaaagttatgataaagatactttagtacttaaagctactgggaatattaactcaggctttgtgaaacctaatcctaatgactatgacttttcaaaattatattggggagctaaatacaatgtatctataagctcacaatctaatgattcagtaaacgtcgttgattatgcaccaaaaaatcaaaatgaagagtttcaagttcaaaatactttaggctatacatttggtggtgacattagtatctctaatggtttatctggtggacttaatggaaatacagctttttctgaaacaattaattataaacaagaaagttacagaacaacattaagtcgcaacacaaattataaaaatgttggctggggagttgaagcacataaaattatgaataatggttggggaccttatggaagagatagcttccacccaacatatggtaatgaactcttcttagctggcagacaaagcagtgcatacgctggccaaaacttcatagcgcaacaccaaatgccattattatctagaagtaacttcaatccagaatttttaagcgtactatcacacagacaagatggcgctaaaaaatctaaaattacagtaacttatcaacgtgaaatggatttataccaaattcgttggaatggcttctactgggcaggcgcaaattataaaaactttaaaactagaacatttaaatcaacatatgaaattgattgggaaaatcacaaagtgaaattgttagatacaaaagaaactgaaaacaataaatagctagtaaaacacggtcgccaacagtaattgtgacgaccgtgttttgatttattatcttagtaatactgccattctttttctcaatgtgagatataaaggaatagctacaattaaagtgaatattacgcctggaatcgcgtttaacaacactacccacacaggtaaatttaaaataatagataatagtagcctagataccaaactgcctaatacacttgctaaaactaatgatagtacatttattttcaataaataaacaactgcaatagctataactctaaatataatagagataatcacattaattggattaaatacgccaaatactagtaataataggctagataataatccacctaaaaagtactttttaattccaaagaaagctaatatcaataatgctgccggtgcagataattgaaaatctaatcctggtataatggacggtattttcaaaactgccaaaatggttaaaatcgcagcaatgacactaatttgagtaatatcttttgatgtcatactaaaacccctataccgtttcataaacaacttgcttcggtgtgctttctaaaaatgatatgtaatgatttaaatcaatacaatcgtccacaaatattattctgcctccatatctcgtattaactggtttaatatcaaataatcgatggtaaccaattttagcagcggcaaaataacctgtcgtatacgttaagtcatcggacacgcaaagttctcctttgacatacggatgcgcattgatacaactagcaattgctaaggcatcagtcactctttcattaagatcacctttattatttatatcttcaaacgaaaaatgtgttgccctaatccccctttgtccaaatgaatctaaacgtttaccagatatagcagatagaataatagctcctgtataaaccgtttcatttttaatatatgtcatcccttgatttagcgcttgttcagtgacaccacattcttgtgttaaatgttggagatttgctttatcatcctcaataatttgtaatgcttttatttgttgaatcggttccatgattttttgtatttttatattgagaaaatccggttgcccattttcatgaaaaaaacctttattataaaacctttgtaccgtctgttctattttgtcaaactcacaaatcgtttcagcaccactaatatgaacatcttgattgctagaacgcatttttatactatacatgacgatcacctcaatcttcttgatgcaaaatttcaaacaacctatctatatcttgttcagtatgaaaatacgacaatgatattcttaacattggcttagtcacagttggataccttaaataacttgtaaacacatgatgctttaataatgtttgatgaatgttctcagccgcttctatgtcatcaaactcaataaacttaatcggcgagtttgaactattataattaacattgagtgcttttaacttttggttaaaatatttactcaaactatttaatttagtgcgtctatcatcagcatttattaacttttcaatgtttctttttataaaatacaaattataaattggcaaactacttgagtagatgagtggtctaccgtgattaattaacatatccttcacatcatttgaacttaaaatcacacccccgtatgcaccacatgctttagataaactagaagtgagtatatctacaccttgataattcgagtaattctctattccaaaactatgtgaaacatcgagtatcagtgttgcgttatatttatgctttaatgagactaattgaccaatatccacaacgtcgccattcgttgaaaatacactatcagatatgattatttttggtatattttgattagggtatttctctaaccttttttctaaatcagcaatatctaaatgcttatatatcactttttctaaaccacttaacttaataccgtcaataatactcgcatgattttcttgatctgaaaacacgacacaatttgtatttttgaaaatattaaataacgccaaattagcatcataaccactatttaagatagtacatgcactatatccgagccaacctgctaacattgtttcaatttcttcataagctgtcgaacttccactaattaatcttgaacttgataagtgataactatacttccgcataaatctttcgaaatcatccttatcaaacgctatttgacctaatcctaaataatcattagatgtatagttcgtacatctcttattttctacttcaatatactgtctatctatataccctaccgatttaagcgaccgatataaccctttctgttgtaataaatcaatttgctcttgaaacttcattcttgttttccttattttcacaagtgtcataatcaatttcaaagcctaaatcattaatcatatcgtagtctaattggttcggttgcccaccagtaattagataatcaccgacaaatattgaattcgccgcttttaatgctaatggctgtaacgaacgtaagttgacctctcttcctccagcaatacgaatttctttcgtaggattgattaatcggaataatgctacgattcttaaacatttcattggtgttaaatcatccatgcttccaaactttgtgcctttgattggatgcaaaaaattaatcggaatactgtcggcatccatttcttttaaagcaaatgccatatcaacaatatcttgattagattctcccataccacaaatcacgccagaacatggtgatatattattcgctttcattagttctatcgtatctgttctatctttataactatgcgttgtcacgacgttatcatggtaattttcacttgtattaatattgtggttatatctgtctacaccagctgacttaagtttcttagcttgttcgtcattcgttaatcctaaacatgcacagatttttagttgcgggtgttgagatttaatcgttcttacagtattactaatatgatcaacttctttatcgctcggtcctctaccactcataacaatacaatatgttccaatatgattatcatgtgccacctttgctccatcgataatttgttcctctggaattaaagcatatcgctgtttttgtttaatatctcgtgattgtccacagtacccacaattttcaggacatataccacttttagcatttaaaatcatgtttaattttacttttttaccaaaataatgttttcttaaaatgtacgcctcatttaataaatctaaggtatcaatattagtatcctcataaattttcaatacagtctcttttgttaattgttccccttgtaatatgcgtttagccaaattcatattaacacttcctatctaaaatgttatgtactgcctttttaaaaatacgtaccatcgttttcacttctttatttgacatacttaacactggcacaaacgtaatgacattttctaaatttctaatcattagcccgttttctttacaattacgtacaatacgttcaactttttcaatttctaacggcgttttactatctttatctgtaactaattcaactccaaacattaagcctcgtcctcttacatcaccaacatttcgatgacgcttcagcgcatgtaactgtttctcaagtgttgatgatgtcgtttcaatatgtgacaataacttacgtttttcataaagtcttatattttctaatgcaaccgtacaaacgatttgatttccggtgtatgtatgaccatggaaaaaggtattcacaccatgcgaatcacttaaaaatgcattgtatatttttttagatgtcaatgtagctgcaagtggtaagtagccaccagtaatcgccttacctaaacacataatatccggttgaacatcttcatgattgcatgcaaacatctttccagttctcccaaaaccaactgctacctcatcacaaattaataagacatcgtattttttgcacaatttctcgacttctttcaaaaagcctttaggatgaacaaacaagcctgtcgcaccttgaatcaacggttccaatataaaccctgcgatttcatcatttctttcaattagaatttgctctatattcgttaaaatagctgtcatcatttcattttcagtatcgtaattactgcgatagaaagatgggctttctacttgaatattctcaaatattaagtctttaaatattttatgaaaggtcttgataccaccaacacttaccgcaccaatcgtatccccatgataaccgtgatttagcgttataaacttgtttttcttggcatatttttctctatcaatatttttccaatactgatatgccatctttattgcgatttcaacagacgcactgcctgtatcagaataaaatacttttcttagattacttggcgtgatttcgattaatttttccgcaagttctattgacggaatatttgatgatcctagcagcgtagaatgggcaattttattgagttgctttttaattaccttatttaagtatttgttattatgaccatgcacattgacccacaacgatgcataaccatctaaatatttattgccattcgtatcgtaaaggtaactaccctttcctttttcaatgatgattgcttcttctttgctatatacacccatttgtgtaaatggatgccaaacatattctgagtctttttgtttaagttgttgtgtgtaattcatttttaactcctattaattgttttaaaaatgcttctgagaaattttcatacgtggcatgttcttcaaatgtatagactgttttatttgttaattttccaatcgtcatttgattgtctttttcaatatagctgtctgtatagcgattcattattaaaaaattactcgccgatacattctgattaacataatcttggtgaacaatggcatcgctaatagcacctaattttgatggcaacacactgatgacacaatctgcacaatcattgattagatctttagtcatgtagaaatcatctgtaccttcatatattggtacggcaattcccccagcaccctcaattaagataaaatcaaattccttatctaaaacttttaccttatctaatacacgctgcttatttagaaaaatttgatctgtcattttaaatgcaaggtgtggtgatacaggttgcttaaaagtataaagtgacgttatgtcatagcttaaatcacattcatttttaaatacttctaaatctggaaacgtcccgtcttggcgttcctcagtttgaaatggtttaaaaatacaaactcgatgaccacgtgttttcaaagcatggtataaatgctttgtaacataggttttgcctacatcagtattcgtacttgtaataaaaatcctcataaaaataaccacctcaatccaaatgtaaacttttataattaataagtttacatttaaggcgcatgtttttcaagaaaacatgaatttaaacttctcagtataactataaattttggcaaaattttgaccttgctattgaaatgactaagacttcttaaggaattcgggcagatataaacagcgattcgataaaatatgtcagttaaaattaataattgcattatttcttaataaaaagacatcctagctttaccatcttgtgaaacaatccattaattgtaatattacgttgagcgccttgttcatcaatgctataattagttacataataaattgaacatctaaatacaccaaatcccctcactattgccctagtgaggggatttattttgctgttgattatctatcaccctttttatttccaaattctgattccatattaaactattatttataatttccagcctgctgatttactttttattcttataaagtcttgatacattcctggttttcgaattaattcatcatgactacctttttgaattatttcaccttcattgagcactataatctgatctgcatttttaatagtttcaagtttatgtgcaattgtaattactgttttgcctttacttaattcattaattgccgtttgaatcagctgttcattttcagggtcaatacttgcagttgcttcatctaaaataattattggtgcatcttttaatatcgccctagcaatagaaatcctttgcttttctccgccagataaattactacctttttcatttagcattgtttgatatccctcaggtaatgacatgatgaagtcgtggcaacatgcttgcttcgctgcacgaataatttcttctttcgttgcacctggattgccaaacaatatgttattttcaatcgtatcattaaataaatacaccttttgaaatactgcactaattttcgacattaacgtacttaatgtcatatctttaatatcaacaccatcgatgcgaatatttccatcatcgatatcataaaagcgcaagagtaagtgacataatgtagatttcccacttcctgaaggtccaattattgctgttgatgtttgtgtaggtatctcaaaattcacattctttatcacttgtttatcatcatatgaaaagttcacgttttgaaaagcgatattttcatttttaatcgtcaaattttttccattctcatccagttctggagcattttttatcttttcaatatcatctatcgtcatatctatcatttcaagtacgtgtgcagcactattaatattttcaacactatcaaatatcacaaatgaaaaaattgaaatcataataagggtaggtaaatcaatactatgattcatatataataagcatgcaactaatacaatcattattgaaacaacttttaaactaagtaaatgcaataaattgaatgggatatattgcatttctatttttgtatttatacgtttactttcattgactgcttggttaaaacttttaagactcgtattttctttcgcgaatgattttattacttgaataccacgaataacctccaataccttttccactaattggttttgtacattatgatacgctggcgcattttgtcgactctttctttctaataattgaatcgcaaaaaatgatagtaatacgccaatgcatgctaataatgatacttgccacgaaactacaagtagagacaatatgagtactgtaattaatatgtatccattaacaacaacgtccaccattttcatagcaaagttttctaaaaaggttaaatctgttgttactattgttgttaactcatttgaatgatgcgaattaaaataacctaaccttacatttttcaatttatcccctatatctaaacgttctttcgcactcatttcataagcgatgctctcatggcttttgcttttgaaatatgctgtaataaatcgtccaatcactaataaaaccatgataattacaacattcaatatatctttcatataaataggtttatgagatagcacattattaaatatttttgcagctaaaaagataggtaacgcaataaaaatagcatttaaaaatgacatgctaaatcctaaaatcattcttgctttatatggtcttatccagtttaaaattttaaatgtaatttgaaacatatttgacctccttttctcattagtttaattatgtccagtattgattccccaatcttttgtatgcatgtgcgtatcccacattttcttataattaccgtttaattttagcaataagtgatgtgaccctttttctaaaatttgttgtttacctaaaacaataatttgatctgcatgttgaatcgtagataaccgatgtgcaataacaatcaatgttttatcctgcgtcaacacatttaatgcttcttgaattttttgttcgttgtctggatcaacgtaaacagtcgcttcatctaatacaatgataggcgcatcttttaatatcattcttgcaatagtgactcgttgtttttcaccaccagacaatttatctcccactgtaccaacattcgtatcatatccatctggcaacttttcaataaattcatgacattgtgctaacttggcagctttttcaactgcctcatccgtagcttctggattgccaagtttaatattttctttaaaagtaagatttaataaaaagttatcttgtccaacaaaaccaactaaatcgttaagttgtttcgattcaatatcttttatatttataccgccaatcgtaatttcacctgaagtcacatcccagtatcgtgatataagcttggcaatggttgacttaccgctaccagatgccccgacgatagctgtgaaattattttctggtactgtaaatgataaatgcttaaagaccagatcgtccttatctttgttatatgaaaatccaacattattaaaagcaatttcataatgttgaggcttcttaaattttgttgacaatactaactcttctagacttaatatttgattcacttcagttaatgcgtattgtatagactttaaatgatttacataattagtaaaattcttaatcggtgctactacacctaaagataatacgatgcataggaaaaattccgcatagtttaattggttgatagatatcaaatacatgccgaccggtaaaatccctaaaaatgttgaaggtaatacactagctcctaaattcatatacccccatgtatttttaaaccaattcaaagtgtgaatcttataattatctactgcatctttatattttttatatgaactttgagattgattaaatgttttaatcacttcaatgccttcgataaactctacaatcgcgctattcatataattattcgatttcatttgttcagcatatgtctcattaaatccagacataacttttttaaaagcgaaaattgaaattggtatcgttactaataaggcactagccatacgccaatcaatgagcattatgtataaaaagatagcagctgacaaaagtaagtttcctataacttcaggaatcatatgtgctaaaggtaattctattgtttcaaccttatcgacaaatatattttttaattcacctattttcttagattccactacgcctaaagggagacgcattaatttttgagctaattttttacgaatttcagataaaatttcatatgccgtaatatgtgatagcatcgttgacgctccaaaacaacacacttgtgaaatataagcgattaaagcaataaagatataaaccataatcgaattaatcgtatatgtattgttaatcatcattaaaataattttaaatactgcccaataaggaactaatccagaaaagacactgatgatagacaacaaaattgataacataattttccatttactatcagaagcaaatccgctgagtatctttatccaatttgtctgattgttcatcgtatatgtaactcctttcaattaataatctaaattaagccgcttatattatttatttcactggatgatatacataatataaatttgttatttgttaaaaattaatacttattacaagtacatcatatattagttgataacgattatcaatgtcgcgtggatttgtgacacatttcttttaaaaattcacaaggttatggggcagaaatgataaagagccactaatgatttattatgtagtggttctgggagtgggacagaaatgatattttcacaaaatttatttcgtcgtcccaccccaacttgcattgtctctagaaattgggaatccaatttctctttgttgggtccctgaatatagccttgtagagtctagtacattgatttgtatcccaatgtccctataattgattattcgctttatctaatgatcctatgactcaactattaaatcatttttcgaaatacttaattctaatataattaaattcatttattgtaatattgcaaaaatacattgcacaccttgttcatcaatgctataattaattacataataaattgaacatctaaatacaccaaatcccctcactactgccatagtgaggggatttatttaggtgttggttatttgtcaccttttttattgttgcgcgttcgtaaccaatgtgcaaaaaacgcaacaagacagccgcttatagctgaagtcatgatgttaattaataaattgaacatccgtcatacacctcctctctgcgttaaagtaacgcccgagatgttaggcgaccatcatattatatcatttatttattatatttcacgcaatattaaggcttaagtaaagttttttttagtggtttacgctactttaattgctatcttttaaaatccatttagataatataaatgtgatgggtatcgtaataattaaaccagcaaatggtgcaatttctgctggcaaatttagccaggatacaaatacatataataaaactgtttgtaagcttacgttgacaatctgcgtaattggaaaactaatgaattttctccaagtaggttttaccctgtaaacaaaataacaattcaaataatatgaaatcacaaaagcgactagaaatccggtaatatgactaatcatatattcaatgtgtaataattttaacagcaataaatagacaacataataatttaacgtattaatgccgccaacaatgataaattttaaaatttcagcatgcgtttgtgttagtttcatatgtgtaactcctcaacatcaaaatatatgcataactacgttctcgaacatactcgaatatgcgagccaatccgcttcacttcaaatatgcttatttcaatctttataccctttcacagcaaatttagtctctttcccctcatccttatacgccattataatgtaactgatttatcgcgtgactcattagcactatagagattactttagttcactagtaattttatatacaataagagcgacaacagtaatgagaggatgtctactatgcaattacaaaaaattgtcatcgctcctgactcatttaaggaaagtatgaccgcacagcaagttggcaatattataaaacaggcttttactaatgtttatgggaatacccttcattatgatatcattccgatggctgatggtggtgaaggtaccacagatgctttaatgcatgcaacaggtgccactaagtatacagtcatcgttaatgaccctttaatgcgacctattgaagcatgttatgcacgcgcagacgaacaacaaattgcaattattgaaatggcggcagcgtcaggtttggatttattagaaaaagaggaacgtaatcctttatacacatcatcatatggtaccggtgaactaattaaagatgcattaaatcatggtgctaagaccattattttagggattggtggcagtgcaacaaatgatggtggtacaggtatgctaagtgcactaggcgtaaagtttactgatgtaaacggggacttattacaaatgaatggtgctaatcttgctcacattgcacaaatcgatataaccaatctagattcgcgattaaaagaggtgacctttaaagtggcctgtgatgtttcaaatcctttattgggtgaaaatggtgctacctatatttatggtcctcaaaaaggcgctgatgcaaagatgataccaaagttggatttcgcaatgtcgcattatcatgataagataaaaatgtgcacaggaaagtccgttaatcaaataccaggttctggtgcagctggcggtatgggcgcagcattattagcgttttgtgagacaactttaacaaaaggtattgatgtcgtctttgacattacagattttcatcaaagaattaaagatgcagacctcgttattactggagaaggacgcatggattatcagaccatctttggtaaaacacccgtaggcgttgcgttagctgcaaaacaatatcatattcctgtcatcgcgatttgtggcagtctaggcgaaaattatcaacatgtttacgatttcggtattgatagtgcctattctataatctcttcacctagcactttagaagatgtcctacaaaatagcgaacaaaatttattaaacactgcaactgacattgctcgtattctgaaattacaataatgtcaaagtaaatcatcagctttattatttgcagttaaaacttgaatgaggtgaaacccatgaaaagaactgataaataccgtgattcatatcaatacgacaatcaaaaccaaaatcatcgtcgtcaatctgaagacgcatcgtatagacaacaatatgctaaaggcgatcctgaagaacacccggaacgatactataatggtagagattatcgaagagaacaaattcttgaagaagaaaacgagaaatcccgccgttcaaaaaaatggttatatatcattattgccattctcttaattattgtcgctatttttgtcacacgcgccttacttaacaatgatagcgataaagttagtaatgaccctaaagtctctcaaaattataaaaaacaagttgaaaatcaagacggccaaattaaccagcaagtagataatgctaaagaaaatattaaaaacaaccaaaaaactgatgacattattaaaaatttacaaaatcaaatcgacaacttgaagcagcaagaacaaaacaaagctgattctaagctaactcaattttatcaagaccaaatcaacaaattgacagaggcaaataatgcacttaaaaacaatgcaagccaaggtaaaattgaaagcatgttaaatgatattaatacaaaattcgacagtattaaatctaaattagaaagcttatttaaagatgacaatggtggcgctaattaattattacacctgctttgatgataaacattaattccctatactttatctgtatcactacgttattcgtgatgatgcattaagagtatagggattttttatataaacttgtattctaactacatacaaatacacacaaaacgtatataatttatataattatatcatttaaaggagtctgatcatgcaatcaacgaaaaccaaaacgaagcatttttcatttttattgctaattacgttaggcgtcatgaccgcttttggcccactaactatagatatgtacgtaccatcattacctaaagtgcaaggtgattttggttctactacatcagaaattcaattaacattatcattcacaatgattggtcttgcactaggccaatttatctttggacctttatccgatgcttttggtcgcaaacggattgctgtatccattttgatcattttcattttggtatcaggtttgtctatgtttgttgatcaattgccattattcttaactttacgatttattcaaggtttaactggtggtggcgtcatcgtgattgcaaaagcctctgctggtgataaatttagtggcaacgcactcgctaaatttttagcatctttaatggtagttaatggcatcatcactattcttgcaccattagccggtggattagctttatccgtagcaacatggcgttctattttcacaattttaactattgtggcactcatcattttaattggcgtcgcttctcaattacctaaaacatctaaagatgaattaaagcaggtgaattttagtagcgtcattaaagattttggaagtcttttgaaaaaaccagcatttattattccaatgctattacaaggtttaacttatgtaatgctatttagttattcatctgcatcgccatttattactcaaaaattgtataatatgacaccccaacaatttagtatcatgtttgctgttaacggtgtaggtttaatcattgtcagtcaagtcgttgctttattagtagaaaaattacatcgccacatattattaatcattttaactattatacaagtggtaggtgttgctttaattatcctgacacttacattccatttaccactttgggtcttactcatcgcattcttcttaaatgtgtgtcctgtgacgtcaattggaccgcttggtttcacaatggctatggaagaacgaacaggtggcagtggtaacgcatcaagtttacttggcttattccaatttatcttaggtggcgctgttgcaccattagttggcttaaaaggcgaatttaatacatcaccatatatgattattatcttcattacagccattctattagtcagtctacaaatcatttactttaaaatgattaaaaagcaacatgtcgcataacacttcaacataattagaaccctagcaaagatatctatctttgtcagggttcttctttatgaattatgagatcgaatcttcaactaaaattacgccttcatagcaaggacatttctattcaatcaccctttaacaggcatccaaatttctgtaatatatttttcacttgtagtatcaccatcctgatacaactcaaaaaatggtgctgattttaccgtatctgcttgatattgatgtatgtagtgatgaacctcttccattttttgttgaactgctttaggtactgcgccctgtgcttcaaataccatatactttgaacttgctaatgttatgacatcatatttttcaatatcagcactattatctccggtaactgcaatcatatatgacatcttaccgtctaattcaggtatacataagccaagtatcccggctaaatcaccattattttttaactgtaaatccgcaattactccctcttgataacatctttgccaaaaccctgctatatgttgctgagcctgtcgtccattttcatacgtttctttaatacctactaacgttaacgacgcaagttgttgtaattgatattccattttatcactccattaattttattcactcatgtaaaacatatgtttaggacattttgcattgacgctatataattatattaaatatttattgaatcaatgcgaggactatattatgaaccgaaaaatattaccagttaaacctatcagtcagctatttcctatccctatggtcatggggtgtgaaggtgtttccgcagccatgatgttgcaatacaacaaccaacatatccctgctacagaaattatgagacattggccgacacatccgaacaatccacataaaggttatgttggacatcacttattcattaagcttggcaattatcatcaaacgatatttccagaagcatatgtaccatttttacaaaaatacaatcctaatatcgtagacggcactggtaaatcgttagaagatcttaaaggtattatcgatcaaggtcaacctgtgttaatataccatactaatcttggttctaaaccattactacgtgttttccgctttgataacaagccagcgaaacaagtttcaaatattcacgtaacgttactcattgggtacgatgattactattactattatatcgatccactttggagtcatattcgtcgtggcctagttttacctgccatcattccaaatcgcaaacaaattattaaaattcgtaaagagaaaatggaatacagctttaattcaccaggaagaaagtgcatttatgtgcaaccacattcatatacaattgaaaatcagcaacaaaataaacacacgtaagtaaacacattactcgcgtgtgtaaaacataaaatgcgcaaactgggtcaggtttgcgcattttaaatttctattatttgtatcgtctcatttatttcctggtaaatatcttctgaacgccattgtcttggatagcctagacacggacagagataacatctgccatcatctatcacacttttacgaaaatgaacatggcccataatactatatggtatatcgaacatcgcatacaaaggattgaaatcacttgtcccaataaatgcattataaaaatcgaatatacgatgcggcataggaacaatgaaatcagggtgcgtcacaacatgtgtgactaaaatcactcgtctatttcctacttctaatatatctttcttcacttgttcagccgctattttagataaattttgatctgatatgccccaagatattcgttctttatcttgccaagtcgcaccataatgttttcctttttgtaactcatctaatgaaaatcgttgtgctgcaaagctataatcataccagccagtatgtcctatgattgcccattcttcatttactataaatggttttcctaccaagcactgtgacatactcttataattattccaaatgtcttgcgtagtcatactttcaacttcccataaatcatggtttccaggtacaaatttcacaggtatatctaattgttttgtcaattgcgttataaattggtgcgtcaattgataatgatttgagatatcccccgcaatcaacaatatatccaatttcttatacttaactatttcaaccaatgcctctaagtaatcttcggatgtttttttattatgacgatcaatatgtaaatcggcgattgtccctatcttcatacccttaccttctttactcaaattaaaatgttatttattatgccatagcttatctaatatatatagttaactgcttcatttagatgattattttatatttttgcataaaaacttatatcttttcaaaaaatcgataagttttagttatcatacccttacctatcaaatgttttttcttatatttaaaaaaataattgctttattaaatggatttctttagtatttataattaagaaaacgcttacacacaacttttttatttgctttatcctgaggaggaaaattatggcaagaaaattgcatagagagttgaataacagacacatccaattaatagcaattgggggcgcaattggaactgggttattcctaggatcaggtcaaacaatatctttaactggtccatcactgttattcacatacatgattattggggttgtactattcgcttttatgcgcgcattaggcgaattgttgttgagcaatacaagatttaattcatttgttgatattgcaaatgaatatttaggcccttttggtggctttgtcattggctggacttactggttatgttggattgtatcaagtatgtcagacctaactgcgatgggacaatactttgcattttggtatccacaagtcccaaattggattaccgtgctatttattgttttaatcttgattagcttcaacttattaggtgccagattatttggtgaactggagttttggttctcgattattaaagttgtcacaattattgcgatggttatcgttggtcttgtattaatctttttctcatttaaaacacattatggacatgcatcattcacaaacttaatcagtcacggtggcatgttccctggtggaacatttggtttcttaatgtcattccaaattgctgtatattcattcattggtattgaacttataggtgtaactgctggtgaaacgaaagatcctgaaaaaaccttaccgaaagcaattaataatgtacctatccgtattttattattctatatcggtggtctattagtaattatgtcagtcataccttggaatgatatcgatccaaatagtagccctttcgttaaactctttacattaatcggcgtaccatttgcagcaggtgtcgttaactttgtcgtgctaactgccgcggcctctgctacaaatagtggtatctattcgaatagtcgtatcttattcggactgtcacaacaagggttaggtcctaaagttttaaataaaacgaatagtcatggcgtgccttatttatcaatgttagtttcatcaattgcattacttatagcagccttgttaaactacattttccctaatgcaattcaactattcatatacgttacaacgttatcaactgtgttgtttttagttgtttgggcaatgattattgtcgcttatctaatgtatttgaaaaagcatcctgaggcacataaaaacagtaaatttaagttgattggtggtaagcctattgcttacattattctagcgttcttcttctttgtattcattttattattctttagtgacgaaacaagagcagctatttatatttcgccattctggtttatatttttatttttcttttataaaaaatacaaaacgaatgctgaaaagctcgcgtatgaacaacgacaaaatgacagcggtcatttcagatatgacaatcaataatttaaacatctcgctctagtatcagttcaaccgatactagagtttttttgaaaataacttcattttatcaatatatctatgtcattatgccttaaaagtgataaaatattaactattaaaattttgaggagtattgtatggcactattagaagcatttttaatttttatttttgctgtgattattagttcggttatcaataatcgattcccacaaattcctactgcctttattcaaattgcattaggtgtcgttattttcattattccaatacaagttgatttccaattcaattctgaagtatttatgtttgccgttatcgcgccactactttttgtggaaggtacccacgtctctcgaacaaaattattagaatatcgtaaacctatactattaatgtcaatggcactagtgtttgcaactgtagtcggtgttggctattttatacattggatttggcctgccttaccaatgccagccgcttttgcaatagcagcaattttatgtcctactgatgcagtagcagtatctgctattacacgcggaaaattattacctaaaggttctatgacgattttagaaggtgaatctttactcaatgatgcagcaggtatcatttcatttaaaattgctgttactgcattagtaactggtaccttttcattattccaagctgttgaacaatttatcatttcaacaatactaggtgtacttattggtgcaattattggattcgttgtcgttagaatacgtatagacttaaccgctaataaaggtttaaaagataacaataccttaacttttattcaattattaactccttttgtcgtatactttttagcagaagaagttcatgcttcaggtatcattgcagttgtaatcgcaggtctaatccatggtttagaacgcgaccgtttaattagagcacaaacggaactacaaatgaattaccatcaaatttggaacacatttagttatgccttaaatggttttgtatttgttgtattaggttttatgattcctactgtagtcatagatattttccaaacagagcctgacaacttttcatttttaatagtgatcactatattaatcgctattgcaatttatgcatgtcgatttgtttgggtttatttctggtacaaagatttttatttcccgaaaaatatacaatcttatctagacgaggaacatgattcacatgaaacaccaccttctcgagtgcgttacgcatttattatgaccatgtgtggtattcacggtacaatttcactttcaatggcacttacattaccatttatcattacaaaaggacaagcattcgaataccgtaatgatttattgtttattgcatctttcatggtattaattagtttaatcttagcgcaaattgttttacctttaattacaccatctgccgaagatactacttttaaaggtatgacttatcaatctgccaaaattttcattgttcaaaaagtgatccagcattttaaaaacgaaagtaaaaaagacaaaaacgatacaaattatcgcccagtattaaaccaatactatggagaattgttatttttattaaattcagaacctgataatcaaaatacaaaagaactcaaacgtttagaagatattgcaaaagtaatcgaaacatctacacttgagcgtttaattgataaaggtaaggcaacatatcaggatattaataattaccgcaatattgtcgaattaacagagacacaccgtactgcatcatttgttgaaaaatttgcaaacttcttcaagatgttatggcttagacttaaagcgatgaagcactacaaagccttaaataaagaatctaagaagcaagaatttgaaaattcattcaaagatgttcaaaaaattatgcgtattgtgaatcacaatattattttacgcttaaaagaagaacaaaatagtacaaatgtacttgaggttagcttagtcattaatcattactatgatatgagtcgctcattaaagtggcgtgcacaacgtcgaaaagaacgtcaagaaaacagcaatcaaatcataccgcaagctatgttccataaccacaaattggaagcattgtacttacaacgtcatcttttagatgaattaattcgcaaaaataaaatcaacaatatcgttgcagctcaaattcgagaaaatatcaattacaacgaaattgtcttgtctttacagtccaaacattaagcaagacataacaatacccccgtacatatgagacaaagtcattatcatctcatatgtacggggtttttatattcaacatcaaaaaatcagattgatgaaaagtaaataacctttcatcaatccgatttgattatagaatctattttttaagtttaaatggaattgtacatacgttaacattcttttgataaattaaatacaatttcatacgcaaactagtttgattgtgtaataaattatgccaacgtttcttagtaataaattctggtatcactactgtaatcatatagttttgatcgttggctttacgattaatcttatcgataaaacgtgaaattggtcgtataatactgcgatattccgaatgtaaaataactaatcttacatctgggaaatgacgtttccatttctcttggaatgctttttcatcttcatctccaaatgatacatgtactgctatgacatcattattcgcaagcatttgtgcgtaataaatagacttatcaactgctgttgtaatacttgttatcggcacaattgctaaattacgatctaccacgtccacattaagaacatcaatgtcagaacgtaattgttctgcgatatctcgataatgtttgttaattttcaagaagaaaatcaccacgaacggcaagaaaataagtatcggccatacttggctaaatttagttatgagtaaaatcataaaaacaataaatgtcacgataccaccaagtaagttcacagacaacttacttaaccaattcttaggacgttcatgaatccatttaataaccataccgaattgtgctagtgtaaatggaataaatacaccaaccgcatacaatggaattaaatcttcagtcataccatcaaatacaataattaaaataatggctaatacacctaaaataataatcgagttagagtagcctaagcgatcacctctaacagtaaacattctaggcatatatttatctttagacattgaagccgctaacatcggaaaagctgtaaatccagtgttggctgctaataccaaaatcatcacggtcgttgcctgtacaaaatagaaggcagcattatcaccaaatatttgcatagctaattgtgataaaactgtcgtttccgtttgtggcaaaattccataaacatatgctaaaccaacgataccaactaataaaaacgctaaaattgaacccatagcaattaacgttttcacagcatttttagcacttggctctctaaaattggttaccgcatttgaaatagcttcaacacccgttaacgatgaagcccctgatgaaaatgcttttaatagcaagaataatgttactccaggaaccgcagttcctactgatgcatgcatatgtggttgaatatctcctgtcgccacacggaaagtacctataaatattaatatcactaaccctataatgaaaagatatactggataggataatacggtggcagattcagttaaaccacgtaaatttaatattaaaataaaaagtacaagtaaacatgcaatcagtactttatgcccatataaacttgggaatgcagcaacaaatgcatcagcaccagatgatatactaacagcgacagtcagtatgtaatcgactaataatgagcctcctgcaagcaatccccatttttctcctaaattggtcttggacaccatatacgcgccgccacctttaggatatgcataaataatttgcctataagacataattaaagcagctaataagatcagaacagcacctgcaatcggtaaagtataccaagttgcaactgcacccactactgatagtgtaatcagtatttgttcgggaccgtaagccactgaagataatgcatccgacgaaagaatcgctaaccctttaaacttcgatatcttttcgtcttttagttctctgttttttttaggttgccctataataagtcttttaaattgattgaacataatctcctattcctttttatagtttttgatggatatcactatacgcctatctttccaaaaagtatagagagttaattaatattttttatgtaattatacacctattaacatataaggtgtcaaaaataatggtaaatatacctctttaattaatttattcaatagaactggtataataaaataaatctcattaggcacttaagtaaatttaacatataaaaaggaacgtttatgactactaaaaaactgtattttctatccatttctattatcattttagtcgccatttcaattgctatatatataacattaaatagcaatacgaagacacggttaaccaatgattcgcaacaacaaatagatacaattatcgagcatgatttacaaaagggacacattcctggagcatcaattttaatagtaaaaaatggcaaagtttttttaaataaaggttatggttatcaagatgttgataaaaaagtcaaagcttctcccacaacaaagtatgaaattgcttctaatacgaaagctttcacaggtcttgcaattttaaaattagctcaagaaggtcgattaaacttaaatgatgccgtatccaaacatgtgcctcattttaaaatgaactataatggtcaaaatgaaactattacgattaagcaacttttggctcaaacaagtggtatacctagtgatattacaagcgaagattctgtgacaagcaaaaataatcgtttaaatgatgtaacccgtgcaattatgggtgatgaattacatcataagcccggagaagaatttgaatactcaaatatgaactatgatttattaggtttaattatccaaaacgttacgaagcaatcctatacaaaatatattacaaattcatggctcaagcctttgcatatgacacatacatcattcaaacaaaccaattacaaatcaaaacatgatgctattggctatgaattacaaggttcgacacctgtcgtctctaaacctgaatttaacctttgggatacaccatcagcatatatgatgacatcaactgaagatttggaacattggataaaattccaacttaatccacctgataaatacaaatcattagttcaacaatcacataaaaatttatcttcaacaattggtgaacctaatgccaatgcatatgcttccggctggtttaccaataatgatgaacatttagtgtttcattcaggaacgctagataacttttcatcatttattttactaaatccaaaacaaaattatggaattgttgtacttgcaaatctaaattcggaatatgtacccaaattagttgagcatcttaatacacaaattgtaaatcacaagcgatattcgacggttgcgtctatgctcaatcaatataaagatcaatttaatattgttaccgttttgatgacaacacttattttattagcatttatattctcagcttatcgtgcttggcaaatgcgccatggtcaaattcttttgcgtagatcaaaacggattgctgtattgagttggttatcattatgtatatgtatcgctttagcgctcatattatatgcattaccatatctcattctcggtagcaataattggtcttttgtactgacttggctaccaatagaaattaaattagcactaatcacaacattaattgcattattcagtacattaattgtaattctgttattccttcatacaaagataacgaagacataataaaaaagacttgttcgagccgtgcgtttgataatatatcatccacgattcgaccaagtctttattctttgtatattaaacggataaattattatttaattggattcatgccatctttccaagtttgataaatcagagtaccaccttgcgctttaaacttctcattgcttacgccacgttcaaatggttgcgcaggttgaatatcaatatttggttcaacaccaagttgttctttataccattctgcaaattcagaacctttaacaggtgcatcatctgctacattatagataccattttcaaaatgaatagcttgaatagatgtttcaactgcatcatcaagatgcacaaatgatgttacgccatctgaaagtgtcacttgaccatccataaattgattataaatcatgccatcttttccgtaccaagtacctgggccatataaccagccaaaacgtaaaacaacgtattcatccatacgagccgtttcttcttctaaaccaaccacaccatcaaccgttacttttctatcgccagttgagttaaaatcaagtgaagtttcctcatttgctaatccttcgccaggttcatacataaaggcaatactttgggcaattactttcttaacgtcatgctttttcgccgcatcaattaggtttttagaaccttcaatacgtactttcgtatttgctgccatatcaacattttttaaatccgtaatttgattgataatgatttctggtttaaaatctgctaacgcttgatcaatagtatcagcttttaatatatcaccaatatatgcttttacattaacagcagctagcttttgttgaccattctcagatgtagtaaaaccagcaacctcatgcccctcttcttttagtctttgaactaatttaatgccaataaggcccgttgcaccagttacaaaaattttactcattataaacaccttttctctatttgtctttttaatataattacttgcttgatgagtttacaaaattcacgtgagacttccaaatgatttgcctcaaaatttttcaaagtgtcgtcgtaaaaactgtctagtaaatactaatagtatgtcgtagacctatgacaaatctgaattatgacgaagatcaatcaagaaaaacagcaccaagatcatttcaatttgaaagtaccttactgctgttctttatttattacatttcaatcttaataatgaccgtaatatcacgtgattgtcatttccttgtaatcatacctaaaacaccaattaatcctgtgcgtgtcgctgactttctttagtatgaattaaatcagtaataaagcgattgactggcgcttcaatatgacgttgtttacctaatgttgcaactgcgccattaatataatcaatttcagtttttctattattaacaattaaatcttgatacatggatggataatgcgcaccaactttttcatttaaatcaactaaatattcaaatacttcatcaacatttaaatgaacattatcaatcgtcgctacatgcactatttcttgcgttaatttataaatcaaacacttcgcataactactttcattcagcgatgccatattacactccaacactgtgcttaatgcatttgccgtaccattaacacaaatctttttccaaatcgattggtataaatctttactaatgacaccattcaattccgcttcgttaagtaaatcagcaacttttataacattttctttaccttcatccactagttcacctatttcaactggtccactaccaagtaaatgactgtgtccagggctttcaagacctgccgtccaagtcgtaacacctctgacaatttgtgattgagcaacatactgcgcaatgacttcttcatgcttcagaccattcatcgtacatacgacgatcgtttcattatcaatatgtggcttcatatcttccatcacttcttttaattgcatagactttggaaatagaaagacaacatcgtaaatgctttcgtccggttgatcattaaaatgatacatcggaatgtttaactcgaatgcctctccattaatcgttatatttaatccatgttgcttaaccgcttcaacatgagatgtatatccgtcaataagtgtgacatcatatcctgcttgaaatagtttggcaccaaagccactacctaatgcacccgatccagcaattgcaattttcatcctataaacccctcttcatcgttgttgttcattttaaaaatactactttcgcatattagcgtcaatttgaaaatcattcgcttaatatgcacacagcttttatcgtctataaaagaacacacctaacattaaacgtcaatacgcaacattaagtgtgtatgataaacttactttcacaaaatttcctttaaaatccctacataataacttgctttcatttcagttttacaaattcgtttgatttttaggaactaatagtaaaatgactaaaaatgcaacaattgctagcaaggcattaaacatcatacctgtgaaaccacctaagttcaaatttaaattagctgctaacacagtataaaccgtaccagatactgctactccaaatgcatttcctaatgatgacgccattttatacacacctgaagcaacacccgacttatcatctggcgcactagcaactgctgtatcagttgatggtgtagcatataatcctaaaccagtaccaaacaataaatatccaactatactagatatgatataccacacttctggtaaaaatgttaacgacaataagattaacccaatcactgtaaagccacttcctagtaatagtgggcgcttcggaccatgttgagataaaatcttttcacctacacgaatcattgacaacactgttattaaatacgttaatgaaatataacccgtttgcgaagaattaaatcctaattgttgttgataatacgtgttaataacgataagtgcaccacctgctacaccatttaataagaagtttgaaatagttgcaccactgtatcctctatttttaaaaattgaaaaatcaacaagtggatgctttattttattttcgtaatatacaaaaccaactaatgaacagataaacacaacaattaaacctagaattaacggtgaaactaaaccaaaatgagacgtctgtgtgatgattacatttaaacttaacatcgtcactactaaaatgactaaaccaataacgtcaaactttttagcttctgctttcatacctttgattggttctgctttagtctcaggtgcatgtttgattaagtacattgctaataatgttaatagaattgaaacaacaaatattgaacgccaacctatatatgtagccattaagccaccaaacaacgtacaaataccactaccaccccaagaaccaatagaccaatagcttaaggcacgttgtcttcttgtaccaatataatattcgttaataatagcaagtgttgatggcataatacatgctgcagacaaaccttgaattattctacctataattaaaaatgctggcaaaggtgtaatgatgatgagtaatgaacctacaacatttaatatcaatcctacataagtaattttgacgcgaccaaatttatcagcaacatcaccagcacctacgataaacaaaccagcaaataaggcagataagctaacagcgatatttatcgttccaacgtcactactatatgttgattgtaatgggacaacaagattaacaagtgactgcgcgaatagccaaaaggtaataacccctaaaacgatacccaaaagcaatcggttgtcacctctaaattgttttgatgtgtccatgaattagataagcctcctatgtttaagaaaaacaaatttttaatatgatatattaagaaacaatatcataaatttgcagaaaattataaataaaacatctcattttttagtatttttacaataattaacgctttttatccaaaaactttcatgataataattgctattttagtgtaaacgcatacaaacacaacctataaaaaggctactcaaagattatttgagctccttgagtagcctcattttttataaatcatgaaacgaaatcgctaaattataaacatcttctactattacatattaatactttgcggccgatgattagattgatttttacgatgtcgtgttgttgggtctaatcgtttttctaaaaatcttaatagtacatcaatgacgattgcaatgatagcaatcggaatcgcacctgctaaaataaacgttgtgccatccgtcgcatttgtaccacgaatcacaatgtcaccaagcgtaggtgctcctataaatgatccaacggcaacaacacctatcgcaacaaccaaggcaatacgaatgccaccgataataaccgaaacagataacggtaattcaatcattcgtagcacttgattgcgtgtcattcccatacctttgccagcatccttaatattcgcatcaacactagctataccagtataagtgttttttataattggaagtaacgcatataaaaacactgttaaaactactgtttctgaacctaagcccatgactaacattaaaatagctaacattgcaatgactggaactgtttgaattatatttgcaattgtaattacaaatccagaaagttttgtgtatcttgcaagcaagattcccaatggaataccaattaaagctgcaaacagcacaccatagacagacattaataagtgtttgaaaaataaatcccatagataaccaaagttcgtaacataataattgaataattgctgtaataaattaccttccattacttatgaccacctttctgtttatcaaaatagtggtgttttttcaaaaattcttctgcgacgacagcaggttctttacctttaccatccgcttcataattcaagcgttgcatctctgaagtcgaaatctttcctgtcaacttattaatcgtcgttttaagttctgggtgttgccgtaataattcatttgttgcaacagcactcgcagcataaggtgggaaaaattgtttatcatctttaagtactttcaaatcatacgccgcaattcgaccatctgtagaataacctaatgcaacgtctaacttctctgagtttaatgcgtcgtagactagacctatttgcattggtctcactgtaccaaagtcaaaaccatactcttttttaaatccttcatagccatcgcctttacgattcatccatgaactatccatacctaaacgtaaatctttactatgctttgctaaatctgaaactgtctctaaatgatattttttagcggtttccttcgttaccatgaatgcatacgtattcgcaaaaccatacgaatcaaaaaacgtttgatcaaatttctttttaaatccttgttgtgttgctatcattgctttcttaggatttttaattggtgcttccttcaaagctcccgttaaatctgtgccattatatctaacacctgatatattagcatccccattaattaaggcattatgttgaatcgtacttgaccctaaattatttactaatgttggctttatcttaccgtgtgtatcatgctctattaacaaccgtaacatatgtgaaataatttgcgattcgcttgttgataatgctgtaattttgacatcatttttcgtgctcttactacctagtccgggcaaactacatccagataatacggtaagcgataagacaaacacgacaagtatatatttaattttcttcattatcttagcctcctaattatccagatacttttaagcctttgggaactacccatttttcaactaaagctaataaggcatcaacacctaatgctagtgcagtaacgagtaccgttgcagttacaatcatcagtggatcatataaatttaaaccattgaaaatgaaatcacctaatccacccgcacctacataacttgcaagtgtagcccaactaattacatacacagatgacaaacgaatgccaccaatgataagcggcaatgctaacggcaattcaacatccttcatcaattgaaattgtgtcattcccatactttttccagcttctttaatgttgctatcaatattttgaacaccgagtaccgtgttatttaaaataggtaataatacataaataaatagcgctacaattgcaggcgttttaccaacaccaaaaatcggtatcataatagcaagtacagctagtgttggaatagtttgtaagacacctgccacagttaatacaatattggcagttcgctttgtttttgataataaaatgcctataggtactgcaacaatgatggcaagtaataatgccactatagaaatatagaaatgttccagtgttttcgacatcaactgtccaccatgttcatgtaggaactcaatcatgatttatcatctcctatgtcacgtactttgacattagtagtgtgttgctcatgcacttttgaggacgcagtgtcttcccccacatgttctgtttgcactgtatcctcactatcgccccaaatcgtgtcatatacaatatcaacaacattggcacgcgtaatcagtcctactaaacgctgttgatcatctacgacaggtacattcctaacgtttctttttaaaatcgtacgtacagaatcttgtaatttagaatcaatttgaacggtataaatatgttgttgcatggtgtctcgtaaacttttgtgtccacgtataccctgatttatatcttcaatgtctaagaaacctagtaaatggttattactatctactacaaaaatagtatcaacacgtttttgtctcataatatgaacggcgtcattcagtgttgcttctgcttgtatcgtgattggtttaatcattacaccttctacagtcttgtcattgggacggtcttgaatcagtctattttgtcctataaaatcacgtacaaaatcatttgcgggatgtcttaaaatattgtctggcgtatcaaattgcaccaccttaccttctgacataatacaaattttgtctgctaatttaatcgcttcatccatatcatgtgttacaaagataaacgtcttgcctaattttcgttgtaacgttttaactaaatcttgtaacgtatctctcgtaataggatccaatgcaccaaaaggttcatccattaaaataatatcttgttcggccgcaagtgctcttacaacaccgatacgttgttgttgcccacctgatagttctgctggataacgctctaaaaatgactccggtaaatccacaagtttaattaattcctttgcacgtttatccttttcctctttagtccatttcaacaatttgggtaccaacacaatattctctttaatcgtcatatgaggcattaagccaatttgttgaataacatagccaatatttctacgcaattcgacaggattcatactccgaacatctttaccatcaatttcaatttgtccttctgtcgcttcaatcatacggtttatcattcttaaagcagtcgttttgccacttccactggttccaataaatgcgataaattccccagattgaatatctaaagagatgtcatctactgcctttttattaccagaataaattttcgttaaatgcttaatacttaacataatcatttctccttcctcataaaaaatatgacgaatgatacgcataaaataaaaagaccattatcgcaattgttaaacaaatagagtcataagttaaacaagtacacatcatggtcttgattatgtagaattttatatttttcatctgtaatgtgaatacttaacagtaaacggcgctatgtatgttgaatttctaccgattactttgtttgcacattcgtatattcgacatttaaaactaacatactctatatgatgttattaaacattattattttatctttggcaactaaatagataactcatattttttaaaagcgaatttattatcgctcaattggttgttttatagcaaaaaagtgtcgaaaatgtgaaatattattacaaaagtcgaatttttgtaataatgcacacgcatccattgttacagacggacaaccgcccatccgccactcacaaagtcatccttatattttaatatcttcatcattcattgtagacacccttgccttttgctaacattttctactcccaagcctgtaacggaattccaacgtcaaagtgttgcccatgacagacacacctaaaaaaacaaccaacagcatgagccattggttgtttcgtgtcatcttgtatgttgttgtataaccggtatgctttactcattaattacttatcatgcatccctttaccttctagtatttggttaatatacttttcaacacgcttttgtcttgtttcactgcgtttagcttgtccaatatgatatatatattgatgttgtctgcctggcgttaatttataaaatgaagactctaactgtggcatttcttcgaacttagcttctaactctttaggaataacatattcctctgttttcttcatttcaacttttttaccagctttttcagctttaattgcttcggctagataatatttaatttcttcggtacgtgcttgaatctctgttaaattttcaaatcgtaactgacgagctgcttgcaccttttcagtctgttgaatgagtgtatgatatttatcctccaaaatggcacctttatgaaataatagtgcaacataatttttgaagccatggataagtactacatttttattattcaacgtgtaacaaggatgcatccatttatacgcttcctctaattctgtttcattaaagattaacgctctcaaatatttatattcttcttgccattgactctctttatttaaaaatgcttcaacttgttcatttgattgtttctcactcatagtcatcacttccattttgtttttcaatacacattgtattatatatcctaattttataaaaaactaattttacaaatgcttttgcgttcttacaaaaaatgcatttgactattattataataagcgtataattgtcgcatattattttttgtatttttggcaataacgaaggagtatttatgaataaagacaagcaattgcacaacgacaaaatcaatctatcccaattagtcttattagggttaggctctttaataggatctggttggctatttggtgcgtgggaagcatcatcaatagctggaccagcagcaatcatatcatgggttcttggattcctagtcattggaaccattgcctataactacattgaaatcggcacaatgtttcctcaatcaggtggcatgagtaactatgcccagtatacacatggctcattattaggctttattgctgcttgggcgaattgggtgtctttggtgacaataatacctatcgaagctgtgtcagctgttcaatatatgagttcttggccgtggcattgggcgaaaccaatgagatatttaatggaaaatggctctattagcacatacggattgctagctgtatatctcatcattgttattttttcattattaaactattggtccgtaaaacttttaacatcatttacgagtttaatttctgtatttaaattaggcgtacccatgttaaccatcatcatgttgatgctatcaggattcgacacttcaaattacggccattcggcaagcacatttatgccttacggaagtgcaccgatttttgctgcaacaacagcatcagggattattttttcattcaattcattccagacaattattaatatgggttcagaaattaaaaatcctgaaaaaaatatcgcaagaggcatcgctatctcactgtcaatcagtgcagtgttgtacatcattttacaaagtacgtttatcacttctatgcctcaatcaatgttacaacatagtggatggaatggcatcaacttcaattcaccatttgctgatttagctatcttattaggaattaattggctcgcaattttactatacattgaagcttttgtatcaccattcggtactggcgtgtcatttgtcgccgttacaggtcgagttttacgagcaatggagaaaaatggacatatccctaaatttcttgggaagatgaatgaaaaatatcatatcccacgtgtagcaatcatctttaatgccatcattagtatgattatggttacattatttagagattggggtacgctagcagcagttatttctactgcaactttagtagcctatttaactggcccaacgacagtgattgcattaagaaaaatgggaccaacaatgactcgtccatttagagcaaaaattttaaaagtaatggcaccattatcatttgtattagcttcattagctatatattgggcaatgtggccaacaacggctgaagttattttaatcattatacttggattaccaatctacttcttctatgaatatcgtatgaattggcgtaatacaaagaaacaaattggtggtagcttatggattattgtatatttaatcgtgctatcaatactgtcatttataggaagcaaagaatttaaaggcttaaatatgattcactatccatttgactttatcgttattattattgtggcacttatcttctattacatcggtacaacgagttcatttgaaagcgtctatttccgtcgcgcaacacgaatcaatacgaagatgcgtgagtcactaaataatgaatcaaagtcatctcattaaatattttaaaatacagtgccatatatgatttcaacacacacacattaaccaaccattgatttcaacatcttggttggttttttattttgaaaatcggttataaataactaacataacaagatgatgatcaggctgggacataaatcaatgttctatgctctacgaagttatattggcagtagttgactgaacgaaaatgcgcttgtaacaagcttttttcgattctagtcaggggccccaacacagagaatttcgaaaagaaattctacaggcaatgcaagttggggtgggacgacgataaagaaatactttttctatagaaattagtatttcttatgcatgagttttactcatgtattcatatttttaagtacacattagctgtggctaatgtataagaaccactacataataaatcatttgtggctctttatcatttctgtcccactcccgtagaagtacatcatataatgctgaaaatggtttgagttaaaacagatatcaagctcgtctgattcagtcacaaaattgtcttgttatacttgtcacctatcatctatagaccgtggtatgattaaattggggatgataaaggaggttaataaatatgaagattaatactacaggtggtcaaattcatggtattacacaagatggtttagatatcttcttaggcattccttatgcagaaccaccagttcatgacaatcgctttaaacattctatgttaaaaacacaatggtcagagccaattgatgcaactgaaatacaacccatcccaccgcaaccagacaacaaattagaagattttttctcctcacaatctacaacttttactgaacatgaagactgtttatatctaaatatttggaaacaacataatgatcagacgaagaaacctgtcatcatttatttttatggtggtagttttgaaaatggtcatggtacagccgaactctatcaaccggcacatttagtacaaaataacgacattatcgttattacatgcaattatcgtttaggcgcattaggatatttagactggtcatattttaataaagattttcattccaataatggcctttcagatcaaatcaatgtcataaaatgggtgcatcaatttattgaatccttcggtggcgacgctaataacattactttaatgggtcagtctgcaggcagtatgagcattttgactttacttaaaatacctgacattgagccatacttccataaagtcgttctactaagtggcgcactacgattagacacccttgagagtgcacgcaataaagcacaacatttccaaaaaatgatgctcgattatttagatacagatgatgttacatcattatcgacaaatgatattcttatgctgatggcgaagctaaaacaatctcgaggaccttctaaagggcttgatttaatatatgcgcctattaaaacagattatatacaaaataattatccaacaacgaaaccaatttttgcatgttatacaaaagatgaaggcgatatttatattactagtgaacagaaaaaattatcgccgcaacgctttatcgacattatggaattaaatgatattcctttaaaatacgaagatgttcagacggcgaagcaacaatctttagcgattacacattgttatttcaaacagccgatgaagcaatttttacaacaactcaatatacaagattcaaacgcacaactatggcttgctgaatttgcatggcatgatacttctagcgcacactatcgcagtgcttaccatattctagatatggtattttggttcggaaacttacaaatattagcagcacatcaatatccaacaactgctcaccttaaatttttaagtcgacaaatgcaaaatgatttagctaattttgctaaaagcggtaaaatgccttggccgatgtatcataatgaacgtcgctattatcgcacatatcaataacgttatcgcatctaaaaaagcacacctgaatttgatagcaggcgtgcttttcatatgagaattatgatgatttaaatgttttagcataatgattatttttcaatgtgaaaacaacgattaatcctaatgcgccaatgatggcactcgtatatgtgatagcttgaacagaaacatgtgtcatgaccaagcctccaataatgcctccaacaccaataccagcgtttaaactagacatgttccaactcattacttggcttgtgtcgccttcaacatgttgaatcacaccgctttgcactgctggattagtactccattgcatgatattccaaataaatagtcctgctaacaatagacctgaaccaggtaagattaaattcataagtaacatcatgacgataaaaatagaaacagaaatcattaaccaacgcttacttgtaattttatcggagaatataccacctaatgatgttccaataacgccagcgattccatttactagaagtgctaatgaaacgaatgacatatcatgaccattagataaaataagtggatttataaagacgaatgtcactgagtttgcaatcaatactaaaaacgtaataattaaatattttgctacttcagcaggtcttaatattttcgaagtaacatgattttcatgagatggtgtctcatgattcacagggcctcgttgtatttcctgatccttcggtaaatagatcatcatcaagaagccaacaataatactcacaataattaagaatagaaatgtatagcgccaacctactaaatcgccgataaccgttccaattggtacaccaaaaacattagcaccactaaaccctgtatagacaagtccaatcattttaccacgatttttaggtgctgataacatcgctgtaatagctaatacttttacgataattagtgctgctgctgcagatgagataattctaccaactactaatattgaaaaatttggcgctacagcaataatgccattaccaatgataaatataagtaatgtccataataatacaggccttgatgaaaaacggttcgttaatttaaccagaataggtccacatatcgcaaatgttaaagcgtacattgtcactaattgaccaacgacagcttctgatacatgtaagtcctgactcatcaagttcataattcctgcaaccatcatttcaaccattcctacgataaaaatacttaaaatgaatgtaaatagtcgcatgattgacaatttaaaactcctttcaaacaaaatttccgatattcatttcccttagaataacgatttattaaaaaatgtgtgcaacacaattttatatataaccgttctattatataatattttgctttaattttctgtgcttaattggaaaattattgaaattgtttttcagtatttgaaaaattaacacaagtatgtcatttaataattatgtataattacttcagtttcaacaataactccaaaaaagcacgcacgctttatatgtcagaacagataactgactacaaagtatgcgtgcctttatgaatattttcgctgcgctaatgaatagcgatactatatgtgcgcgtcacttcatttccaattaaaactaatgcctaaatctgatgcagtaaaatctatcatgattcactcttaacatcagtatttcgtgctactaattgatgtcttgcattgaaaaattgaccatagcttaaatatgtcgcaatcaaagcagacataatggtcgcagttgtatgaataaacacgactaacaattgaaatttaatcgcttgtaaaggtggtacgccaccaataattaagcctgtcatcataccaggaatcgacacaagcccatatgttttaaccgaatcaatagttggcactatagctaaacgaatactttcacgtattgcacctttagaagccaatttaggtgtagctgcaagtgataatttagattcaatattagtaccatcttgtacgaatgcacgatctaaattctggtaagctaaattaattgcaatcaagccattatttgcaagcatgccgccgataggtataacttcatttgcggtaaattgaatggcccctgtcgcaatagtacctgcaagcggtaatgccgttccaatgaagatagctagaaatgatatccaaaacacatgatgcatcactggtgatgctcgactaattgtattccatgatgcattaataataatgaccaatacacataaaataagcagccatttatcgtttattttaaaaatataatgcagcaaaaatcccaaaatgattaattgcacaactgctcgtaatgtcgcaacaattaaatctttaataatatgtaaaccttctttatatgaaatgataatcggaatgactaaaagcaatgccgtcaatccaagtgccgtattactcatgttgattcaactcctctgtattagaaatttgaccatcaacaattgttatacgcttttgaaagtgtcgcatactttggtcatcgctgtgggtaatccacataattgccacgccttgatctgctaatttaaaaatgatattttctatcttttctttattattaacgtctaatgcactggtcgattcatctaataaaagaatatccggtgtatacatcagttggcgcgctatagcaattctttgccgctcaccacccgacatattttccacttccgaacttaattgataatgtcccaaaccgacatctttaattaattgctttgcacgttttctatcaaatttatcattacgtgcaagtgatgggaatatcatgttatcttcaatcgtttcaccaaacaagtcactttgctgcatcaaataactgattcgttgacgcaattcttccgggtcataatcattatagggtttacctttaaaataaagttctccactagttggactaaacaaattacatatttgcttttgaaatgtacttttaccactacctgatggacctataatggcaatactctcgcctttatctacttttagactgatatgatctagtatgattctatcgctcgctttatacactaaatctttaatttctaacaacatttgcaccgctcctcatgtaatatatcaggtatattattcccgtttttttggtttttagtgcaattacatttaagaaaaaatcattttcttgtaatatcaaaatttaggcataattgattttcagcatttaaattaaaaacaaaaaatcctattaacatggatactgtctaatgactaagaattaaaattagacaattgtttaacaacctaccatattaaaaggattctttattatttatggatttgattaccacatgatatttttataactttcatcattcaatgaacggacaatttcagtaacaagacggatagaattttcataatcatctacattgagcactgaaacattagaatgcatgtatcgcagcgtaacaccgattgtcatcgttggaataccttcatttgcgacatgaatacttcccgcatctgtacctccacctggtgtcgtatcccattgtacttcgatgttatgttccttagctacatctttaatatgctttcgcaaaccttggtgagcaatacttgtagcatccatcataatgacaactggaccaccgcctagtttactatcgctcgtttgacctgacatacctggggtatcataagcaatacctacatcgacagctatcgccaagtctggtttaatcgtattcgctgccactttcgcaccacgcaaaccaacttcttcttgcactgtggcaccactgtataagttaatgccaatattttcatcttttaaacgttttaatacctcaatagctaatgcacagccatagcgattatcaaatgctttcgcagttaaatatttatcatttgcaagcacttcaaattcactatatggcgtaaccatattgcctacttcaacgccagcttctttagcttcttccttgctactaacaccaatatctataaacatatttttgatttccattggctttttacgttcttcaggcgttaagacatgtggcggtttagaaccgatgatacctctaatttctttgcccgaatctgttgtaatcgttactttttgagatagcatgacttgattccaccatccaccaactggcgtaaatgaaataaaaccatgtttatcaatctttgttaccataaaaccaacttcatccatatgaccagaaatcataattgagtattgaccattctcagcatttttctttccaaaaatgccacccaagttatcttcaataatttgatcactgacaggctctatatagttacgcattgcttctttaacttgcatttcataaccagcaatgccgtttacatctgttaaatgtttaagtaatttgactgactgattcatgttattcatcctcctgtatttcaacttaaaactattgtatcactaactttcagaaaaacgttccctaccgctttatcattttcaggcttaaatatttttaaaattttgtgaggaatccgcttaaaaacctcatatttctaaaatttaatattccgaaaaagtcacaatttaaaattccttattataatacgttattcttttattgttactaatttcaatctgtttagtcttgcgctattataaaattaaaaagtgtagagataacaacgcattaacgtcgctattttccctacacttaaatactagtttctttaattaacttatcattaaagttattcagatattgaatattcattaatcataatgtgaccatgccgatagtattaatacttctttatttcgatcatctacggtatagacgaccctgtgctgatggttaattcttcttgaatatcgctctaaatatttaggctctaatttttcaaaagattgtgttattttatacggatcattttttaaagtctcaacaatttctaaaaatgacttctttaaataagaatgttttattttctttaaatctgatttcgctgaatttttaatcttaaccgtgtaattgctcattaaagattatcccaatcaatatcatctatatttgttgtaccactattatctttttctctttctcttactttgtccattgtaccagtagattcaagatatattgtctcttgtatacttttccaatcttctaaacctataatcacagcattattttcggcattattgccactaatataaattggttcgtgattattattaacattttttagtaattgataaaaatcttttctcgcttctgtagggctagtgataatcatataaaccctcctttgttttctgttacgctaattatagcgtacgcacttgagtacgtcaatattaccaacgagttcatcgtattcttaatacctatatgctatcgttcacaaacttttgttcttttcttccaacataccgcctataatgctcaaaaagaaatcagcagtggaacacactacgttccctaccgctttatcattttcaggcttaaatatttttaaaattttgtgaggaatccgcttaaaaaaactcatatcttcaaaaaaaatgacaaaatttaaatttttgaataacatcattttttagtaaatgttataatttctttataatacaaatatcgaaagaaggcgactgactttgaaaaaattatgttcattaattgtagtagcattagtttgtatcattgcattatcagcttgtggtaaagaacaaaccaaaacatatgaaggtgatgttagtggtaaacatgtactaacttctatcacatataaagatgataaagttttaaaacagtctacaatcaacacaattaaatatgacgatctaggtatggataaagacgaagccaaaaagttattcgccaaatctgaaagtattttcaaagaccttaaaggcgtaaaatacaaagtagactataaagataaaaaagcaattgaacacttagacatagattacacagaagttgacatgaaaaaattaaataaacgtcttggtgtttcgactaaagaaaataaagatattagttttgaaaaacttgaaaagcaattaaagcacagaggtttaaaagaaaaagataaaatggacgacaaatagtttataacttaaaaatgccctcagataagactaaggttacaaaccttaattcatattctgagggctttaatatttgaagttcttgtgtgaccagcatccactactaatataaaattatttgcagtaacgctaaaatccgctgctttcaatttcccgaaataattaagttaactaatgagttttaatttataatcatgtatcgtttgtaactcaccatcgacttttcgatatacaatatgatcagcagtaatttctgtaggactggatacgccaacagctgctgcaatattgaataagccttcatgcaaacttgttacatagtttgtgacacgatattgcttttctccaacaatcaatgctttttctttcttcgcatctgtcgttgcaacacctacaggacacgtattcatgtgacattgttgactcattatacaaccgacactaatcatcatcccacgtgcgatatttacaaaatctgcacctaaacctagtgcaatcgcaattttatctggtgtcactaacttaccagatgccgccaatttcactttatctcgaataccatatttttctaacatgccagacacaataggtagagctgtaaatagcggtaagccaacaccatcttgtaattcttggaatgttgcaccagtaccaccttcaccaccatcaatcgtaataaagcttggatacttatctagttccaccatcgtacgtacaagtgtttcaatttctgaaactttgcttactacaattttgaatcctactggtttttgacctaattgctgcaactgatcgacgaaacgaatcaaatcttcaggattatgaataaattcgtaacggttaggtgaattgattgttttataaggttcaacatttcggattttagcaatttcttcgtttaccttttcagcttccatatgaccaccacgagtcttagcaccttgtgccaacttcagctcaaatgcgcgtacgttagataactgtgcaacctctttaaataaaccttcactaaaattaccttctttatcacgaacaccaaataaaccgggaccaatttggaaaatgatatccccattaccttttaaatgatattctgataagccaccttcacctgtattcatccaagtgcccgctttagctagacctttagataaagctgtaatggcattttttcctaaagcgccataactcataccagattgtcctacgatacgttttaaaataaatggatgttttaaatgttcacctaattttattgcatggtcatcacttaagtaatacggatcaatctttgtcggcacacgatattcttcacgactaaataaacgctcattcgcgattttataaatgaatgttgataacaatgttgtattatctactgaaatctcattacgttgcatcggaaacattgtgttctgtatgtaaaagccgtcttgataatctttagtagtaccgaagctggtcatacgagagttatattttccagccaaaacgatatttttataatcattacgtgaaaaaggtttcccttcattatccccagaaaataaatactgacgtaattccggtcccattttttctgaaatatatctaatacgtgctagtaaaggataattccttaatacactatgttgtgattgtcttttatctttaattaaccaaataagcccgataacaataaccgtaagcatgaatcctacaacgataatgttaactataaattgcatgactgtaagaaacgtcattacaatacctccccccaaaatttcaattcaatatttatgatacaccttacaaaacaaaacacaatggaagcgcttcattttataaaacaattttatgatatgtttttcattttaaattttaatgtataaaacatacaatacaaagtaatatgtgctaaagtatctatataatacaactatttaagaggtatactatgtcaaatacaaataaacattacatagaagaagaatacgctaccgaacaatcgcgttttttcaaacgtgatattggatttattttcctttacatatttttggttaacatcttgccgatcattatcgtctttttaacttttgggttagtagctgtattcactcaacaagctccgtggggtttctcttttcctatttcaatgaacattagctatttactcgcagttattatttcactagctatttttcgtctgatgcatgaagatgcgtttattccaatgatacgttcgcaaatcgttgctagtgctaaatataaatggcatattcttatatcatttacactaagtgtcgtactctttttacttttaaatcatttcaatattttcgcactaaatgtagattcctttactgtctttgacatttacccgctcattaaagggtatggttccatcagtttaatagctatattttcgttaaccattatattaaatactttgatttgtcaacttattttccgtcatattttaattcaagaattaagcagattaatacctttaaagattacaatagtattgtccattatccttgaaactctgttctactatccatacattaatacatggtgggaattcattccagcattgatactagcaggtagtgcgacttacttatatttaaaatcataccgtaattttatggtgagctatttctatcaattagcagttatactcgttttgcatattttcatgtaaaatttttcagagtattatccattatccatacacatcaaaaagcacacttaaaagtcagtatcaaaactcacttttaagcgtgctttatttagatatactgtcgttctaaaaacgagccatatagaatgtttcatgtcctagcatgaagcacatgaatcgccatgctcaatataccttttaaaatttaaatattcattaacttaatatgctttaattcacttcattaaagactactcgctggacgtggtgttggctttttcaagaaactcataatcattattacaatgactaacataccacaaattagatacatccatttaaatcctactaaatcggaaataggtcccatcaatgcgccacctaacgatatacctaagtctgcacaggcaataaataaacctaacaacatattacgacctacttttggtaagacgaagcttaagtatgatgttaatgttgggtacaccattgcttgcgtcattcctattaatatcgcactaccatagaaaataattgcacctacttgcggaccaaatgccactacaaatgacgcgattactaataatgatagtacagataccatatatttaggatgccacataccatctgacggaatgtatttccttaagtaaaatcttgccgcaacaactgcgatggcctgtattgtcaaaaagattcccgcattcgcgaatcctaaactcactgtgtataacggtacaaatgtactaactgcaccaaatacaatcgatgcaacaatcatgataataccactgttcaacaactctttatttttgaaaaattgcgcaaaaacagttacagcgttaaacggcattttttcaatcttatctgacgtatcgggttcctgttcagcaaaggtcacgcgatagccaaagaatgttgttgttaatgcgataaagataatgacaattgcaaatagtgaaatattatttgcattccaaatacctacggcaactaatggtccgattaagtttggaatcgttgaaaatagcgagtacaatgatacaccttcagaacgatgttcctctggtaatgcatcaataatacctagctgtaaagacatagaaaagaatgccgtacacacaccttgcataacacgtgctacgaaataaccttctaagccagtaaaaccataaataattaaagctatggcattgataatcaaaataattcttaatactttaatgggaccgacacgagcaataatttgtcctgcccatggtcgaaataccattgctgttaacatgtatgcccccataacgataccgataaccgtattcgttgcgcctaaatcatgccctcgtaaaggtataaacacgtttaagattgcattggcactaaagaacatcaatgttaatatatataatctcaaaaagggccaagccattgcacctttcattatctcactccttagaatgatagttgtttttctattaattctcttgtataagcattgtcacttttatgcaatgcgcttgtcggaatttgttcttctatttttccgtttttaaaaataattaattgatcacataaatacgtggcagcttgaatatcatgtgtgataaaaatataactcaactgacgcgtttcacgtaaatgaatcaataaatctaatatttgtgtttgaattgacatgtcgagtgaactaatggcttcatcaaacaaaatatatttagggttaatacatattgcacgcgcaatcgcaacacgttgcgcctctccacctgataacatattaggatatttatccatgtatgccttagatagaccgacttcttccaacaatgtaattgcttggacttccataacttctttaggttgtccatcacattgacacatcacttcaaataagatttctctaacagtctgaaatggatgtaatgatgacgtataatcttgaaatacagcaccaatttgatgacgtctcactttcttcttatgcatcggttgatcatttaaggttacacaacctttatccggtttctcaatacctaatatcatacgactcaacgtcgatttaccgctaccactttctccgataatcgcaatcgtcgcaccgattggacactcaaatgacacacctttcacgataggtgttcgacgacgcttaaaaacatgtgcgctttgatatgacttttcaacatctttaattttaatcatgtacatcacccctcatcacatgtttaaaatgatcattaatcttcttcttcgttgataataaatacttcgtataaacatgttctggatgatgcaagactgattcacgtgtcccttgttcaataagctgaccatttttcatcacaacaacacggtctgcaatcttgttaataaccgttaaatcatgtgaaatgaaaatcatcgcacagtcaaagtgttttttaatatctataaatgcttccagtacatcatattgtgtaattgtatctaaagccgttgtcggctcatcagcaatgattaactttggtttcaaagctaacgctaaagcaatcatcaatcgctgtaacattcctcctgataacatgtaagggtatgattttaatatacgtttaggatctttcaaacttaaataatccatatattcaatcaatgtcttttcaatttcttgtgtagacattgacgtatgtactttcatagtctcaaacatttgtttaccgacagtagttgatgggtcaaaggcacgactaccttgttgcatgaccatcgcaatgtctttaccacggtactttttcaattgcgattcagataatgacaacattgatgtaccatcaaagataatttcacctgtcaccccgagtcgttcgggattcaaaccaataatcgatttacaagtgattgatttaccactaccactttctccaataacgcctaaagtttcacccttagttaatgtaaaattcacatcactcacgagtggttgatctgtccaggtatctgtaatcgtcaaatgtttaactgttaacaatgtcatgattgcaccactccttttttcacagaacgaagtttatctttagaagagatgcggggatcaatagcaatttgtaaagcatcggataagaagttaaatgccatcactataatcactatggcaatacctggcgcaaacatcatttcaggatgtgtaaacatcacttttctagcttcgttaagcatcatgccccactctgcagtaggcgctttgacacctaatcctaaaaatgaaaagccagatatttgcaagatcattgaacacatcgagctactagagatgatagcaatatctgctaatgttaatggcataatatgtttgtgaataattttcatatcattcataccgattgttttagcaaatcttacatggtcagaagcagtgtactgcataacacttgtacgtataacacgacagaaccatgcccaacgcgtcaaaataaatgccatgataatattttcggcacccattccaaacaatgcaattaatgctaacgttacaacataacttgggaatgccaacataacatcacacgcacgcatgattaaggcgtcaacaaacccttggaaatatcctgataagaatcctaaaatagatccaataagtacagaaacaaatagcgcaacaaagacatataacaaacttggtctaatcgcataaattaacctagttaaaatatctctacctaaatggtcagtacctagtagatgttgaaaactcatgccagcaaatttgtttgctgtatcgatatggttaggatcataaaatgtcacaagtggtgctgctaatcctaaaaagacatataatacaataatgcctaaagcaattactgcacctttatcttgtaataatcgttttaaaattatcatcgtgcgccctcccttaatcttggatttaatagcgcattaatgatatctgctaatgtattaaatacaataaataataccgctacaattaatacatatgcttgaatgactggaaaatcgtgttcaagtattgcttttaaacttaattgacctagtccaggccatgcaaagatatactcgataacaactagtccacccattatcattggtatagacatacaaaagattgataccgcaacttgtaaagcattacgcaacacatgcaacattaatgtgatagatttcacaccgcttgctcttaaataaagtacataatcttcatttaattgttccaccatcgagcgtctaacatttctaaagtaaataccagcataggcaatcgtaataacgatcactggcaatatgtaactttctggacctgttaatccagaagtcggcaatatgtttaacttcactgaaacgtaaataataagtattgaagctatccaatatgatggtaatgcagttagaaagaaagccactgaacgtatcgcacgatcagtgaactttcctctttttaatgcactaactacacctaaaataattgatgtaatcatcaccataacacttgaaattattgttaatttcaatgtattcataaatgctggaccaatacgttcagcaactgggtcacctgtaatgtagcttgtaccaaaattaaattgcatcgcttcaagtaaccaatttttatattgaattaataatggatcattgaaaccgtacttctcattcgtttctgcaatcaactctggtgttacatttggcgtcccttgtgcatgtaaaattgtcacagctggattttcatttgtaatatacgtcaatagaaatgtcataaaacttactacaatcatcaatggaaacatgagcgcaatacgttttaagataaatttgaacatctaattgctcctttatttatactgcatttcattgaatggtaattcatactgtgattgtgtgaatgatactttttctaaatcttttggtgcaacaactgtcatactaccgtgtgaaatagggataaagataccttcatcatcaatttgtttcaaaatgtttttataagcgtctgaacgctctttaccgttttggattttaaatgcgtcatcaatgctgttgtatattttatctttgttctcaatgcctgatgttgcactttcataaccatttttcgctttaaatgctgcaatagtactttgtggatcgtacaataatccccaagtttggttgaacattaagtcataatcaccagaagtacgacgttcagcaattttatctgatgtttcgccattgatgtttaacttaatacccattttcttaaattctgcttgtaagtattctgcttgttctttttgacttgaagaacctttgtcatagtacattgccatttcaaggtttttaccatctttttgacgaacatcgctgtctttacctttcttccaaccagcttcatctaataatgattctgcttttttaaggtcatacttacgtgttggcatatcgaaattaatgtctgttacatttttcgcaaataattgagttgctggtttttcttgaccatctaaaatttctttggcaattttatctctgtttaccatatgaccaatcgcttgtctgactgttttgtcactcacagcgttatcttttttaccagaattgacaactaacattttcgtattcataggttgactacgcttaacttgatagtcacctgtatctttcaattgttttaaagagtctttgtctaagctatctgtacctctatcatctgtgaaggcaaagttcgtttcaccttttttcattgataggaatgctgtttcaccagcaggcattacttttgcttgtactttgttaagtttagacttttcgccccagtattgatcatttttgttaaagtctgcagactcatcttttttgtgttcacctaatttaaatggaccagtaccatcgaactttttaacgccatcttttgttgtaccgtttttaaagtcttttggagacacaaatacatatggacgaggcatcgctaattcagccaatgcaggttgatatgcttctttcaaattcaattcaaccgtgtacttatctttaactttaacattgtcaattaatgtcgaaatctttaaccaagaatgcaattttttgttttcttgaactgcgtcaatatttttcttaactgcgtcagcatcaaatggcgtaccatcatggaatttaacgtcatctctcaaatggaacgtgtatgtcttcccatcttcagacacatcccactttttagctagtaaaggcttaataccatctttcgtgttacgtacaagcggctcgtatatcatactttcagcagacattgatccaccgtaaacatgcggattcatatcaccgatatctttaaccgtcgtatacgttaattgcttgttttcttttttctcctctaaacctttattaccgccacaaccagttaaaattagccctgatgcaagtaacattgcactcattttagttagttttctcatttgcttttcctctttctaaattgataagttgcattacttaatcaaatcgtaatgattatttttctcaattatttgcttatttttatgtaaatgtcaaacataattcaataatttttttctattataaaacttcaaacccttattatgaaagcgttctattgatttccaaaaattttgtgacgagtgctttatctccttcaaatagatttgtattaaattgagaagataagtgttgatcttgatgcatatccttgtacgcctggcaacttgcttcatagcgagttaggaactgatcaatcattggcgttttgatacctagcattttcccaatatgctgaatcatcgccgttctgtaataatcttcacttggcattcttggaatttgaacaacatcctgttcatttttatagacttgcttaaatggtacagctgaaaaatcaaagtaatgtccgttttcgtctggctgtgaaaatggatcaatgaggattgcggtatatcttacataaagcagatattcttgtaagatatctggcaagatttcgaaatgctcaatatcaccttcatccaaagtttcaggacgtactggataattttccttcaccataaattgaagcaggttgactgacggcactctaaatgcttgtaaaataaccatcatttccttccacattaaacgcatttcacggattagtgtcatcgttatcggtccttcaggaaataacttatacacataaaccggtacatctgttccttcgaaaatggctttcaatgaaaagtcattcataaatagtggtgggtgcacataaagcgaactgtttcgcgtttcagcatgcagtggcgattcaacgacttctaattgaatcttcaattgctcagctaaagcagagattcgttgacacattgttgagtttgaatgtgtcgatcccatgtacaatttcttttttacacctgttgtcaacacatgattaggcgcttctttatcaacaatacgtgtatcgccaagataagttgagaatgaaatcacttcgatatctttattaaatttagacataaattgttcgacaatcatttgcgaaccaaatgtcggtgatattaaaatgacatgtttgacactttgcaaagtttctaacgacaattgctgtagtgtgtcataataagcatctgctgtgcatgccatgacaaccgtttcgtattcacccttaacgtttttaacatctttatacaaacgattaatttcaaacttaccttccagatgttgatgcgcctcgttttgtattttgacttcaaattgtttcgcttttttatacgcttgatataagcgttttgatttttctgatgttgaggcacgtccaaccatatcaatctcataatctgattttaaatagcaaatattcgctaattggattgcgaccggaccagtgcctatcattaataatttagacatccgtaatacctacctttatagctgcttttttataaagtgctatatcaaaaatttgctgtggtctcatatgtttattcacacattgccacttatcttccgctgtttcttgtgacggataattaaatattgctttgatgccatcaccaaagcgcattgcaactacgacattttcatttgttaaatcatataattcttctaaaatgctgtactttaaaggaattgtcgagctgaatatgatatgcgtcacatctttgatatctttaagttcagataccttttgatccgtaattgttatatcttcatttggtgctaagacgttaacgattctgcgccctaggtcaacggcttgtggatcaatatcaataccgataactgaagcacctgtttcttttgctacttgaattaacgtcattggatatgcacctgaaccaactaacaataatttgtcattgctagctatactacattgtccaaactcttcatcaatacaatgttctatattgtcaaagtaacctgtggtagacgcctgtccgtctaatagacgtctcgctctaatgacttccacttgtttaacacactgcgctgtaatatattgcagtgattttattaattgtgctttttcttcaacgtcacgccaagcattaaattgttgttcataaataggatttaaaataaattcactatagtcatccatcaatgtttctaatgcttcgatatattgatcgtcttgtaatacacgctcgtaatgcgcttcaaacttttctaaatattgttgtaatatcaatttgatttcattattaaagttattcattgtaggctccttattctatatatgcttttcctgtagctacagttgtaacctgtcctttaattgaagtttgatatcccaattgatgacatcgctttgatgtcactaaaatactgccccctggctgatgtactgtaaaatctttgcatgcgtcattacgttgataattattaaaaaccccaattgatgctgtaccagaaccacagctattttcccaaattaaactttgaatttctggtatatagattaatggctgtaaaaattgacgttgttcatcaaaaagcatcatacctactgttttatatttgtgactccattgttgctcacgcacaaacgcttcaaccaaatgttgaatttctgttgttacttgtttaactggaatcacataatgtacatatgtttcataaataatttctattgctttccatgaatgattacccatattaattgttgttggcacaacacgatgggcttgtggcatttgaacttcatagtattggcaatcatgaattgcgcattgcactaaatccgaacagccagacaccttcaccttaaactgttggtctttaagcaaatgactttcctgcaaatgatgtatatatgacatcgtcgcattaccgcaaaattcattaccgctcataactaagtgaaaatcattaccatcatcattttgtgttgattctataaagcctacctgttcacagcatacatgtgttgcggccatcaactgattggcgatagatgcatattcactagcatcatgttttgaatgaacaagtatcgtcatattccccgaaggattatacttagaaaattctataacctgccgattcatacgacactcctttagatgtatttttagagcctctgtaattttaattactagaggctcttatgcagttgttgcgaagcaaacaactgtattcctctaaacctgtaattttttagaagatgaacctaatagctctatctagtaggtaagtcatgctaattcgcaaaagcgaaaaccatggctcttatgcagttgttgcgaagcaagcaactgtattcctctaaaactgtaattttttagaagctgaacctaatagctctatctattaggtaagtcatgctaacccgcaaagtggaaagcatgacttagtaatcggttgttgtatcaaaatgcaaccgtaaaccttatttaaagttgcttcttgtggctctacaagcgaatgcagttgtccgttaactacattcacttagatgcttttactgttttcacctcaactaaaacttcaaaaaagttgcagaaaacaaatcgtaactattacgatttgattatatactatattagttgagaatcattgtcaataaaggttgtaaatgaatgcacatttatattttgataatccttccataaacttcgtattctcagcacattcaagtctttttgaaaatttttatcaataattgagtagaagttccgttctagtcagttcaaaattttacgtaagttgtctctgcgtattgctttagtgagaataacccacacttgtggaaacgtccttttgttaatctacaatggatacccttgtctttcgctaacatttcctattaccaatcctgtaacggattttcatcgtcaagttgttgcccatacaatacgcaccaaaaaagctttgtacaatttcgtacaaagctttaaaaatttaaataaaaatatcattgttttaatgaactagccatatcagattttatttcgtttgctaatacttgtaattcagggaagtaattattagcaaagccaattattattttattttttacaaacgtgttaatctctcgatcttctggaatcgtattttctattaaattcaaaagctcactatgacttatgttctctatacttactgtatttaaatattttaaaatcacaagatacaattcatcaaatacttcatgttcaaaatcaaagtccaataataataaactaacggaattagtttctaactgattatctccaattttatctgcaatctctcttatagcttgatatagcaatctaaaactttctttttcttttaacataaaattctccttaatttattagaatagacaaaatacagcttattttaaagatactccaaaagtttgaactcgagattctgataaattagatgcacgacctacaatacgttaaaacaagctttaagcaatacacttcaaatgaacaatatgtgattttcaaagattaattaatctccgctttaaatgtctttcattgcgacaatatgcatacattgcctacttcatgccaaattcttttccactggatatcgattttaaataattattccaatgtccgcttccacgaatcatcacttaacatctcgccaggccatgtgtaagccatcacaccaccatcaattcgaatcgtctctccagttatgaatgaactgtcgtcagatgctaagaagactactaatttagcaacttcttctggtttacctaaacgtcccagcggagtcatccatttttgattttctctaaatgttttacctgcatcatcctcactcgtacctgtcagtttatctactaacggggtttcaattgtacctggtgcaatcgcattggctcgaatgctatcacggccatactcaattgcgattgattttgtaaaattaatcactgcacctttcgcagcattatatccagagcgatacaagtctgctgcttgtccggaaaatgaagacgtattaacaatagagccaccttgattcatcattaaaggtaacatcattttcgtcattaaaaatgtcccacgcatatctacattcataatcttgtcatacacatctattggatactcatgaattctatcagccgcattatccacaccggcattattaaacaacacatcgattcttccaaactgttcctttatgtcagacacaaagtctaccacttgttgttcgcttgcattatccacattatacgccttcgcattgtcaccattacttttaattttatcgacagtctccgataccgcttcagctatgtctaccgccaatacatacgcaccttattgagctaaagcgattgcagaagcttgaccgatacctgtacttgctcctgttacgactgctactttattttccaaacgtttcattcagtcactcctatacaacatatcttaaacttacagtccttattttccactgttcgatgcttcataaacctaatagataagtcttcaggcagtcttaactactctgctatacactttctattgaataactcaaaatatttaacaatattagtttttttattttctgaaaattgttacttttgagagtattttttgttacactttaaatatttaacaaaggggggaataattgatgacatcaaaacatcaacaaaaggggtctatcgtcaatcgtttcttgaatagtgttgaaaaaatcggaaataaattgccagatcctagcgtcttattctttttaatgtgtgtgggcttagccattatgacatgggttatctcattatttaatgtatctgttaagcatccaggtacgcatcaaaccatttatattaaaaatataattagccatgatggatttacgatgataatgaatgatacgattaaaaatttctcagagttcccagcattaggcttagtactagcagtgatgattggtattggtgttgcagagaaaacaggatacttcgataagttaatgatttctgttgtgaatcgcgcaccacgtttcttaattttaccgactattatattaattggtattttaggtagtacagccggcgatgctgcgacaattatcttgccgccgcttgcagcaatgctttttattaaaattggctatcaccctatcgctggactaacgatggcatatgcttccgctgttggaggatttgcagcaaatatagttgttggtatgcaagatgctttggtctattcatttacagaaccggcaacacgtatcgtttcagattctattaaaacaaacgttgctatgaactggtactttatcgcagcgagtgtcgttgtattacttcctacgatattgctagttacaactaagctcattattcctagattaggaaaatatgatgacagtttaatgcatgatgaccatgaagaaacatcttcacatattactgacaaagaagcacatgctttaaaatgggcaaatatcagtttcatagtcacaattattttattaattattacagccattcctgaacatagctttttaagaaatgctaaaacaggcagcttactagacgatgcgccattaattaacggtgtcggattaattattcttgtcgtatttttagtacctggattagtttatgggattttaagcaaagaaattaaaaatacaaaagacttaggtaaaatgttcggcgatgctgtaggatcaatgggaacatttatcgttattgtgttttttgcagcacagctacttgcgtatttaaagtggagtaatttaggaattatcgctgctgttaaaggtgccaaattattagaacatcaaaacggtattgtattgatactaggtattattgtactgagtgcaatggtcaacatgttaatcggaagcgcatcggctaaatggggtattttaggaccgatattcgtaccaatgttaatccttatcggctttcatcccgcattcacacaagtcatttaccgtgtaggcgattcaattaccaatccaattacaccgatgatgccgtacttacctttattattaacttatgcacaaaaatacgataaacgcatgaaactcggagccttactttctagtttaatgccgtattcaatcgcgctaagtattgtatggacagtatttgtcatcatttggttcctattaggtatccctgttggaccaggtggaccgatattcgttaaataacagtattcaaagggataaattaaaatgccactatacaagatttgacctgtatagtggcatgatttgttatgatatagcgttcgagatgaaactctgcatttatatgaacaattatagtctatcactaataatatttaatctgttccaaccgttaatttggtttacaacaaagacaagatcaataatttgttcttcatcataaaatgattttagccggtcaataatttcaaacttcttaaagtctttgattgaatttaacatttctgcaaattcaagcgtcactttttcttgatcagtaaataaatctaaatgtctaaaactcaagacttcatcaattttcatttgtgttacacccaattcctttaattcttttttatggatatcaacacaataatgacaaccgttaattttagaaattaataacttaatcaatgcactaagttcatcattaacgggtgattgatgaataaacttttcaccttggctcattacagacattaactctccattttgtttcttgtaattatacggcatttgcaatctctcctttacattgtttaataccaatccagtgatactacacttcgaacaatattggatagaatttgaaattctgtataacatcttgtcaatctatgctttagttaaaacatttagcacttatatttaaaaaatatataaaatatgaaaacagattgaaaggatattataccttgctctacccttttttataaaaaaatcacacacatttgagaaaatttgataatgtcaataaatcacgtcatcgacattgttattcgatatatattgttcttataatggccaaactattattccatttaaattaacgtggttcgtttgtgttaatgtactgtacaaaactggggaagtattggtgatgatgaagtgatttatattaattgcgaaacaccttcgatagcaatgacatagattattggaagattaaatcaaaaataaagaagaccctagtggccttcttttttatctaattcttctttgattttttctggtgattttctttcatgtgctggttttaataatttatctactccttcactttttatcatagcgccaccaaattgataattatgttcaggcgatgcataagcagtaaaatcatcttctttattttcattgatgtatccttcaatcacagcacttcccataggacttgtttccaagtttgtgaaatgtacagatttaatcgtgttcgtttctttagtattatgcttaagatagagtgtaatacgttcttgttgttctttgtagtaaatcgctttttgtttttctttttcatcatatttcattttaaaatgcatgaccgtagaaactgtacatatacacaatatgacaccaataattataaaaacatgttttttggacattaaagtaactcctaactttagtgactcttctttttatttagttctttttttatatcatctggtgattttaactgattggctggctttagtaactcgcttaatttttcactttctatcatagcaccaccaaattgataattatgttctggtgtagcataagcagtaaaattatcttttttgttttcatttatgtaaccttcaatcacagcacttcccataggacttgtttccgagtttgtgaaatgtacagatttgattgtattcggttctttagtgttatgcttgagataaagtgtaatgcgcgcttgttgttctttatagtatattgctttttgtttttctttttcgtcatatttcacttttaaatagatacctgcaacactaattaatatgattaacataatactagttaatattaaaattttctttttcgacatctatcaccagctcctaaaatgtggtggaattttatacagtttacatatttatgatactacaaaacacactcttacaaagaaaatctataattttaatctaggtcaaggaaaagcagccaaaagtgtttatataagatcaacgaaatattgcgggtataaagtggttaacagataaatacagtggaaattgtactaaaaattcaacttttcatttttatatgtaagtatgattaacttgaaaacaaaattaaaacggccgcatagttttagcggtcgttctttttagactctaattccttttttatctcatcaggtgatttggtttgatgtactggttttaataacgtgcttaaatttttacttttgattaaacttccaccaaattgataattatgttctggagacccatatgcaacaaaatcatcttctttattttcatttatgtaaccttcaattactgcatcgcccataggtcctctttttaaacttgtgaaatgtacagttttgatggtattgggttctttagtattatgcttaagatagagtgtaatacgctcctgttgttctttatagtatattgctttttgtttttctttttcgtcatatttcacttttaaataaatgactgatgcaactatacatatacataaaatgacaccaataattataaaaacatgttttttgttcattaaagtaactcctaaaatgtggtggaaaatgaaaaaatttttataatctataattatgaacattacagattataaaccataacactaacatcgtcgccttcattaacttgattgttaaaatcagcaattactgagaattgtacaaggaataattgcctattatgccctcatgtaattattgccttactaacattaacaaaatcgatagctattacattaaatgcctataccccagacctcaaacacctttttatacaggacgcactgtaatttcattcacgttaacgtgctttggttgtgttaatgcatataatactgcttctgcaatatcttgtggttcaagttttttacgatctgttggattgtatgcggcagttatggctgtatctaccattcctggagaaatgcttgttactttaacgcctgtctttgccaactctttttctaatccttgagtaatagtgtgaactgctgctttcgtcgcactataaatcgtactacttttcgttacttcaaagccagaaatagatgcaatgttaataagatggccacttgattgttctaacatagttggtaatgcagcctgtgccgtatataaagtgcctttgatattcacatcaatcatactatcccactcatctacttgataatcagtaatcttagacgacaacatttgccccgcactattgataacaatatccaaaccaccgaatgtttgttgtgcaatttttatcaattcatcgacttcttctttattcgttacatctgttggcactaccttcacactatcttgtgacaattgattcgctacgttttgtaatttttctttatttctacctgctaagacaacttttgccccttcttcatgtagtaatgttgcaattgcttctccaataccactacctgcacctgtaactactgctactttatctgttaatactgtcataatgatcgactcctttgattctttttattttttcagggtaaatcataaatacatattacttttaaaaagcgtatcacaattcatataacggtcataataactcgcttcattttcatagataaattacattacaagccattcgaaacatacaattaatcgttgcttatattttttatttttaaaaatgttgaaaaatcgtcacttctttattgtaaaaacattatattagtaataaagttaatactgtgatttatcattcgcttgaatgattagagggaggaataaaacgtgacatatcatgagcgtgttttagcattaagagcagaaagtaaaagaaccgcatttgattttcgattcgaagatttatttagcaaagaagaatggctaagtatgtctcttgcagaaagacaaaaagctgaaaaagcatttcgacacgaagttaaaaatatggacgatgtaagaatgcccttctcaagtgtccatgacgcccaagtaaaattatataatgttgtatattcttataacggcattaaacgtaattttaaacaagttgaaaatgaaggattctaatatcatttcgtttatatatagcagacatgatagaattttatatgtaaatcttgtaggtaatcgttttaaaaataatataagtatgactaaagccacatccaatataggacgcggcttttagtatcgttccagatttgtggggagttagggtttacttaattaaaggggtctgccctcaattgctcaccaacgagggcaagttacatcaatcacacttcaattgccgccgactaggggtagtaatcattggcaataagaactagttagtgactaacgatttacgttccatagcaaagtgatacaaacgctcagcatcaatgtaaggcatagaatcaatagttaggtaaccatctttgatgtcaccaattaatccttgatttacaccagtgttcacgtaaatatcatagctacttacgtctgagaaaataagcgcttcaatctcttttctcataatcatcactccaatgtttatatagtatttatataaactctctcgtctctctctatttattaacttcttacaagtctaatattacatgaatttccaaataaataaagggatttgtgatgtatttcacaaatttatcactattttggaaaattaagaaatatttaattatataaaagtttaataagtcagaaaatatgataaaatgtagatgttctttagacattaaaagcttctaacatgatacggaatatgaggttcctgtatcacattagaagcttttttgttgcggtgcttatattaataatggcatgaatgaacgcatgctgtcttagctccaagaatcatataagctattaaacttccgttctttgaatattttttaatttcttactaatatcatccagttcattcttcgcctttttaacccaatctccttgagctacattatcaaattcacctttaaattttttgaaatggctacctatatttcacagctcactttagatatcgaacttgtttcttcagagttacttgttatattaccaggttttatttgatattcagtttgactcataccttgtatcctcacttggagtatattgtacagaatctgtaaaataaatgttttcttctttattttcgacaaaggtaaattcaagacttctagaacctacggatgaaccttttaaatctccatcgcctttcaataatagtttcggcgcttgtttggttggaatatcatatctttttcttaactgttggacattataatcatcattattcaattgatattttgccgaataacttggtacattaggattatatgaaatatcaccatctttataatcattaatatctttaaagttgccatattgtacaaagaacttaaagttttcaatctctttttttaacttgtcattcggtagtggcttcgttggtatgattttattatgttccatttttaccggataccttttttcatcatcctttggtctgccgttactgtcatctgtcatttcacttataaaataatacccttttgtggttctagtattgcgattgatatagagcaccattcctctcgtttccatatccttaccttttggctcgattaccatttcagaattaactatccaagtacctttatcaccctttttaaattcttgatctcgaaagccttctttatcgtaaaaatcatcgagatttttggttggatataattttaatgtttgattaaatgtgtctttaatttgggcgtttcgaccatttgtttttgttataatgacataacctacaatcaatataatgagtaataccaagcatataccgagcgttaatttctttgaatgaatcatcatttctccaccttatatttttaatattgactcagtttttaatatttacaactaaagcgaaaaattattttgaacactttatgaaatttttatttcaaacttctattaaccctattcagtaggtttgaaattaatactatcagaaaaatacacattttcttctttatttcttataaagttaaattctagttctttagaacctacggatgagccttttaatcgccatcaccttcatacagtttgaagtcatatttaccaattgtaaatgacgactagatgatatatagttcaagaaacatcaaaattcgttaaaacataatcaaattttattatgttcaaaactttattttccaaaaaataaaaaagaagttaaacaaagattggttgcttaacttccattattgaattcattagtccgatttgacatagatcccgaaaaataatggctaatagccacttatagtcgaaattatgaactatataattcatttattattaaatggattatatacttattgtgtttcttaatacctttttatactttaatatcttgaattttttctaaatcattactaatatcttttaattcgtctgtggcatttttcacccaagccccttgtgccgcatttttaaaatcatcttcaaattttttgaaatgacttaccatttggtcaagtaatattttctcatcacttttcagcttattttgatgatcatgatgcatacgaacatgttcaggcgcaataacctcactaatctgttctttttccttcatttgttccaatactgctaaatctggtaaaccactaaaatcaagtcccacgcttattcatctccttcaattctgtcagattgttttagatattctcttcttaactcatctttataatcttctaatttcatttcgtgatgtcggatacgttgattcgtttctctatcgaaagattctataatacgtgtcatcctgatcatagcgtcttcactataattcattttatgtttgagatataagaaatgatcatacatttgttcacatttcttgcgtgtttgatgtcttaattcatcaatttgattgaatgcatcattcaattgttttctttcttcatcataggcattttcaagttcattaatatttttatacgtagtaaacattacatcatcccatcaatctggctcgctaacatttggtcattagaaacaattgcttcgatactctgtttaatttttgcgatatagccattacaatttttataaacatcatttaatttctttatcttatcatcaatttttcttttgggatctgtttcaagtttactttcatacgcgccaccttttcttaattcatctataacctcttcagaggttaatttttcaccaatttcatttccaacttcttgcgcttttttccagttgtctccaaatttatgtgccatcgcgtgatacattttttcaaatgttggctttcttcattcactaattgatttaagccttcggcaatggttagtgctgttaaagcttctaataattgttgttgggaggaagagagtgatccacccgttgtttgaatccaattcgctcttaacgtctctactttatgtaatctatgcctcgtttgtttacgaacggattttaatgctttattattttcgtcttggtagcctttaactttgtttaattcagctaagattatagcctgtgttctgctcattaaaataccactcattgcatggccttctccatttttaagtactattttttctccagcagtttcatataaatgattgcggacacctgcatctaattcgtcttcatcagacacaaatcttacaatgtgaccatcgtacttttcaatcaattttttaagttcttcttgatcggcataaaggccgctcacatctttgatcgctaatggagctggattatacacaacgatatgtttaatatcattactcatacctaaaatcatcgcatctctaccgcccagcgaatgtccggtaataatatcaatatcatagtcttttttgatatttttgataaagtcttgggtatttttataatgtggatctttatctgtgacggaatgaaggccaatattgacatcggccccaatatcctttagcgtttcactcacatctatatatccttgataagaaggaacaccaaatgtttgttttaatattgcgtctttgtgtacattagtacctgtcatacctaaagtaactttgccagtgtctttatttaaaaaggcgcttgtagtcgtgcctgttttggggtccgtataacttttaagatatgaaagatttttagggaatttatttttttcttgtaactttttaatttgtttatcaattttattttgttttaaaccactgttatttgcgttttctatttcataacttatattagatactgtacttgtttcttcagagttaccttttatattgccagattttatttgatattccgtttgactcatgatttatcatcctcgctaggtgtaaattcgaccgaatctgaaaaatagatattctcttcttgattttctacaaacgtaaattctagatccttagatcctacggatgagccttttaaattgccggatcctttcaattttaattcgggcgcttgtttggttggaatatgatatcgttttcttaactgttgaacattatagtcatcattattcaattgatactttgcagaataacttggcacattaggattatatgaaatatcaccatttttataatctttaaaatctttaaaatttccatattgtacaaagaacttaaagttttcaatctctttttttaacttgtcatccggtataggctttgttggaataattcgattattttccatcttgacaggatattttttttctttactacgtgaatatcctttactatcttcagttatttcggtgacaataaaattacccttcgttgttctagtattgcgattgatatagagcaccattcctctcgattccatatttttcccttttggttcgataaccatttcagaataaataatccaagtccctttatctcttttatcaaattcttgatctcgaaaaccttccttatcgtaaaaatcatcgagattcttggttggatatacacttaatgttttgttgaaattttctttaatttgagcgtttcgaccatttgtttttgtcataatgacacaacctccaatcaatataatgagtaataccaaacatataccgagcgttaatttctttgaatgaatcatcatttctccaccttatatttttaatactgactcaatctttaatttacacaactaaagcgaaaaattattttgaacactttatgaaattttcatttcaaacttctattaaccctattcagtaggtttgaaattaatactatccgtaaaatagatgttttcttctttattttctataaatgtaaactctaaatttttgtgtcctatagatgatccttttaaatcaccatcgccttttattaataatttaggtgctttcttagttggtatatcatacctctttctaagttgcttcacattgtagtcatcattacttaattgatactttgctgaataacttggcacattcggattatatgaaatgtcaccatctttataatcattaatatctttaaagtcaccgtattgtacaaagaatttaaagttttcgatttcttttcttaatttatcatcagctatcggtttggttgggataattttattatgttccatttttactggatattctttttctttactacgtgagtatccttttttatcttcccataattccctcacaataaattcaccttttgtcgttctggtattgcggtctacatacaggaccaatcctctggattccatattctttccatttgtttctattgtcattttagagtgaattatccaagtgcctttgtcgcccttttcaaactcttgatctcgaaagccttccttatcataaaagtcttcaagatttttagttggatacaggctcaacgttttgttgaagttttctttaatttgtttatctttactgctttcttcctttttcattccgcaagcccctataaaaacagctaataatactaaatacagccagagcctcaacctttttgagtgaatcatcatttcacatccccatttttatttttgatgcaaagttaagttcaaattccaatattaataatattagaggaaattttatgattaaatcctcgtggattttaattgttagttgtatttttcacatatcaacatcacaaattatttaaaaagcgcaaatatctttataatttttattggcctaaccaactaattaattaagataaattgcgcttatatttaaaataataacactgaaactcaatgtatttacttattaaaattgatgtttaaatacaactttactaacattcatttttcggtttacattaatttgttagataacgatatatatcatctcttacagctttatccagtgctaaatccatcgttactacgtttgaaccattcggcattttatcttgcttttctgaaccttctatatatccagcagttcctaaataataaaaatatataccatcatcatcttttttctgtacaaaaatatacattttaattccttttgctctatgggacaaaattttctgaacttcttttgattctagcgttctattagatttagtaaaccattttaattcatcttgacttaaaaattcatcttcatattttgtgctatcacttatatcctcatgcttatcataagtgataaatattggcatttcttggctttttatcatgtatcccatgattacagacgaaccatttttattccaattaaatattttactaaaatcttctcttgaatatttattatataaaatcagtccatttttacctttttggtatttttcattgttatactttgataattcaataagatcttctaaaaacatattaaatgtttgattacttagagcattagtaaatgcatcgcttagtcttatcattctttcattacgttctataatgggacttccatagattttttcaattcctgcgttgtaaaatgaaaaatctaaaattcttaatgaagtatctatatcatcttctgttatatccttaacttcgttcaacattttattttttaattcatcatatgttaattcattttttaaaagttcttctaaaactaaactatcgattcttttcaatccaggtgctatttgccttgaaaagaaaaccagatttttagattcattttccgtcaataatgtatctatttttttatatctcactaagaactcgtaataattactaaatttagaaaatataacgcttggatctatagaatgttgttgtatgaaatccattagtaacggcatgtgtcccaatctattttcaacttcttcataagcttttaatattaatttattttgatttaatgatactgcatccaatgaattgtaaatctgttttttagcaacttcttcaaaattaattgtagatactccattaatcgaatcgttattcgttaaaaacttcttataattatctttattttgcgattgatccccagaaagcgcaatcggaattaaataatttgtcttataattaccaataaaatcaattactgtaacatactctttatttgaactttttcttaatcctctaccaagttgctgaatgaatataatactagactctgttggtctcaacattacaacttgattgacttctggaatatcaataccttcgttaaaaagatctacagttataatatagttaatcttaccttcttttaatttttctattacaatttggcgataattaacactatcatctcctgttaaagcaacacttttaatcccttttgaacttagtttatccgctaaatcataagcttcttttttgctacttacaaaaatcaatccttgtaaaatttcacctgaatatccatagtaatctgtcttttgaataatataattaactctttcatcagaagttaaatatctcagtttagttacatcatcttctttaataccttgatgtacataatcagtcacaccaaaataatgaaatggacataaaatatcactttctaatgctgcttgtaaccttatttcatatgcaatattataatcaaacagttcaaatatacttaattcatctgatctttctggtgtagcagtcattcccagcatgaacttaggtttgaagtagttaaatactcgttgataagtagatgcagcagaacgatgtgcttcatcaaaaacaatataatcaaattcattttcatcaaattgcttaaaattatcatctctagataatgtttgaatggttgcaaataaatatttggcatcgacatctctatgttttcctgtcaacaatccaaaatcactatcattttttataggtaatacttttttaaattcttccttagctctatttaaaaccccctcattatgaacaataaataaaaatttattagggtttacttctctaacatctaatgcacataaaatcgttttacctgtaccagttgcagatattattaacgccttatctttggctttatccctaatagcttttaatgaccttaatgcttctgcttgcattaaattgggtacaatttccactgattttttcaccttatcagctagcagcatttgagtttgttcaacctccgctaatttttctaaggaacggtactcaaatgattctttatatgaattaatccattgctcagtcagtggggtactcttttgccataacaagtcaaattcactttttacactatcaactaaatcgccatttttcatagtagacagtaaaacattatgctcataattaacctttaacgcattagatgttaaattagagcttcctattaccatagaactataatccttatgctcaaaaatatatcctttggcatggaatccagcaatatcagttaatcttacctctacattttttaatttaagtaattctccatacattttaggactattaaaccctaagtaattagatgttaatattttccctttaacacccttattgcttaaatctaatagttgagcctttaagctggctaaaccgctttctgttataaaagccacagaaaaataaaacgtttcacatttttgaagttcatctataattgttgaaagaactttttcatttttattatttactaaaagcttcggtgtataattccctttatgagaaatatgtttgtctataaaccctttatgtaaagattgattgaaatcatttagtaatctactcatattatccctcagtcataattttattaacggctggtatatccgctggggcccaatttaatttatcaagttcgtttattgacaaccattcaatactcttatgttcagttagagttggtaactctttgtttaaagtacatttgtatgttgttaacctaacaattccaaaatcatattcatgttctgtagttataactttgtctccaacaattaaatcacatttcatttcttctctaatttctctaatcaaagcgtctttttcagtttcattcttttcaaccttaccgccaggaaattcccacattaaaggcagactcattttttcacttctctgtgcacaaagaattttgttatcagaaaaaataatagctcctactacattgattacttttttcataagactcacccttcaatttaaaatcatcttaattgttattctatcaaaaattacaaaactatatataaatcaatattaaaaattaatattttacattcacatgaacgctctactccatgcattttcatacacatctattatataatacttgtgaaaagtattgtcttggggctgtgtttttttacttttggggcgtatttctttataattcattacataaatgtaagggctttagttttcatgttttattaagtctaactgagattttgaaaggatgtttagcaacaatggataaagaattatggatagaacgagctaatgatagtttagttaaacatttttatgagcagcaatctgacattgaacagcgagaaggttttgaaagtaaattaacatttggtactgcgggtatacgcggaaaattcggtcttggtgaaggtcgacttaataagtttactattgaaaaattggcattaggtttagcgcgttatttaaatgcccaaacaaacagtccaacaatagtcattcattatgatattagacatctttcaactgaattcgcccaaataattgctaatgtattagcaaaccatcaaataacagtttatttacctgatacatataaaacgacaccggaattatcgttcgcggtgcgcaatcttaatactactgctggcattatgattacagcaagtcataatccgaaagactataacggcatcaaagtatatggttctgatggtgcgcaattatcgactgatgcatctgagcttgcaagtcgttatatcgaagaagttggcgatccattacagattgatatacctatttctaaacaaaatacatcttatatcaagccttttccgaaatctgtaactgatgactatatgaaacacattcaaaatatgattggctatattcctaaatctgatttacaagttgtgttcactagtttgcatggtacaagtgttccgattgtacctgagttattacaatctttgaatttcaatcaatttaatcttgtagaagcacaatgtaaacctgatccgaatttcagctcagttcaaagtgctaatcctgaagatcatcgcgcttttgatcaagcagtcgaacttgcaaataaaagtcatgcagacttattaatatcaactgaccctgatgcagatcgacttggtattgctgaacgtgatgcacacggtcatatcacatattttaatggcaaccaaattggtgcgctgttacttaattatcgtattcaacaaacgtctcaattacgtcaccgcttaatgattcaatctattgtaagtagtgagttaacaaagtcattagcacgctataataatgttgaatacaaagaggtgctgacgggctttaaatttattgctcaggaaataagacaactggatgatcatcaaaatatgattttcgcatttgaagagagttacggttttctatcagagccttttgtacgtgataaagatgccgtacaaattgtgccactcattataaaatacgcttctgagttaaaattatatggcaaaacattgaaagatgaattagaacagatttatcaaactgttggtagacatgaggatacattattctcgcatacgctagaaggatttgaagggaaaaagaaaattaatgcaataatgaccaaattccgttcaaatccaccgcaagagattcaaggactcaaagtgaaagcaattgaagattatttaactagcgaggtttatcatttggataaagatacaacgtcgcagattaattctcctaaatcaaatgttattcgtgtcttatttgacgaaggatttatcgctttacgtccttctggtactgaacctaaaattaaattatatgtgtcgttaaaatgtccgaattttgatgatgtagctcaaaaaattaatgcgatgatttttagctaattaaaaattttatacatcgaaatattacatttcattttatgcttatcagcccttttgaaactagaatccttatgttttcgcgttttgaaggggctaatttgtaataatttttcaaaagtatattagaaaattaattttcatgtatttttcatattaagcggtaataatataataattaataccgcgacctatttaattgttttcgcgatgaaaaaggtttagaattacaaaaataactattttaaatttagttacaaatatattttagaaaggatgtgaaataatgaaaggctctaaacaaatacttttgattatgggcattatatctcttattgttttatttatttttacactattcatcatggcgcaatatgcaaaacattatgaacaaaaatccgacagttccaacgcacatactttaaattcatcatcagccataattgagcaacatactatgtcgaatttagcgtctctagatttatacgctcctgttcgtaacattacttctagtcgtgatattcatcccatttatttcatgacaaaagattaaaacttcctttttcataaccccattcattcaactaataaattaaaaaatgataaaaacgtactgttttttagaaacatacatatataagaaacgcatccattactaaaagacagtacattatattctatcaggaaggtgcaacaatgaccgtcaacatcgtatttagtatcgtattctgcataagtatggttatattaggcatttatgtcgcaataactaaagatttcacactaatctcttttataaatcaaacggccattgcagataaacacaagaaccaaattgcatatatatttacgctatgtataagtttgagtgcagtatttttaatgtcttcaattctaagctttgaatatgattttattgcattagcattcttatttttaacgatagcattattacttatcgcattattctacgtttgcttttataaaattacaaaatacccataaatgtttgtgatagtgtgttggttagatttattgatgcgctgtcagtaagtaattgtttgcgaaaaaaatacaaccttgtacgaatacaaagttgcattaatatagaatcatttatgctttttaatatcacaaaacaaattgattaaactagctaaaatagtcaaaattggaatcaagattacataaatatcataacctctagatattagtatacataatataattagcgaccctattataattgctaaattataagccaaactaattttatatttcatttcaattcccaccttaatagcatttattaaaattctataatgtttacatagacttcttaacaaactttaacccagctaagctaagtattgaaataattacacctcctaatataaatatattacttaagcttagtaaaggtataattatacttatcagtcctaaagacaatgtatccgctgcataattcgatgtagatgagatactaaatactttccccatcaaatgatttggcgtttttatttgaatggcaactgatcttgttagtccctctatagattgtccaagtcccaataatgttgcacctatatataatatcgccacacttggaaacacattaataatcgataagccaattccccaaactaaaacaccaatactaaatttaaagattaatcgcttttctgacagcaaacccataatcaatgacattaataaagatgctatacctaaacatgatgtagctagtccatatacaccaacgccctcttttaatatattggaaataaacaatggtaatacaacacgccaaaggccagtattaatcaatatgcaggcaaattggatgattataataaatggaatttctttagattgtttcaagaattcccaagtttcagaaaaatcttcttttgagtgtctatcaatcatgttgttatttgtatattttaaaagtgcattaaaaataaatcctaaaaatagcaatatactacaaataaaaaagacgccaacattaccaactagtattacaatgacaccaattaaagcaggtaaaataatatttgagcctctttgcaaactatcgattaacgcattacttgttgctaaatgctcctcatcaataatttcaggaagaattgccctaaacgcaggatccgtatagcagttaataatggtgatagctgtagatatggttagaagcgtcagataatttaaatttgatgttattgcaagtaaaggaataattattataatcaaacttagtataagatcagatagataaagtattttctttttattatgtttatcagaatatgcgccaccgaaaataccaaatataataaatggaagtgtttgactcataaccatcattgataattttaaagatgattggtttgtcaattcaacagtaaaccaaattatttgtaacgaaaacagcacaaaacaactccgacgtaagaaattaccaatcaataaatatgtaaagtttctatttttcaaaacttctaaatacaacatatttatcacctctcataaaaataattgaatgcatccaccagcttttttagaccttcttctaaactctctttatccaaagcgcaattaattctaatataatttagtcagttaaatatcaattatttcgaaatatacatactacttgaaacaccatacataacccccaaaatgactactcagaggttatattctactaattatgattatattaaatatgaaaatattatcaaaaaaatcaaatttataacaaaaatacaccccttaaagttaggtctttcaatccaacttttggggtgtatatcattctcatcatattctaggttgtttttaacaaactaaatatagtgaatgcaaatcaactattatttaaattatgaattattttaattctttcttctacgagccaataacattaatccagcaattccaattatactactaaagatcaaacctttttgcgtgctttctaaacctgtttttggtaattctgctcgttttttctcttgattagctactgattctttagcaattttagattttttaactttatcatttttatccattgaatgaactgggccatttggttttgctctgtctttcgataatcctggattgttaggatttactgggccacttggatgagttggtctgctcggcttctctgggttttcaggtccttttggatcttttggtttctctccaccgaactctacaatcttatctactggttgttttgtgatctcttctgttggttgaccctcgccaactttttcacctgttaatgggttcactgtgattggtgttgtgattgtcttacttcctggttgtccttcttgtttcactcgctcttcaccaggttgtaattttggattaaactcacgttttgtttcaaacggtatctctactgtttttgtttctggtgtacccgtttttggtccgtgtttaatcacatcatccactggctcttcgatcacttttcctgtgtctggattcttgattcctggtttacctggtactttttccgtttgatctgttggtaagtttggatcaaagatatctttatgaccttgcggtattttctcgccaccgaattctgttaattcattaactggatcttttgtgatttcttctttcgattcacctttactaataatttctccagttaatggattttttagtgttggcgtcgttattgtcttctcacctttttgtccttctcttgttactttttctgtccctggtgctaaatcaggattaaatttacgttctttcttgaatggaatttcttctttttctacaatcgagtctccttttacaggtccatattttgttacgctatcgaccggtggtctaactacgtctcctgtttctggattcttaattcctggtttacctggaacttcttctttctctcctgttggtaacttcggatcaaattcgtctcgatgacctggtgttatcgtttctggtccgtattctgttaattcattaatcggatcttttgtgatttcttcttttggttcacctttactaataattactccagttaatggattttttagtgttggtgtcgttattgtcttctcacctttttgtccttctcttgttactttttctgtccctggtgctaaatccggattaaatttacgttctttctcgaatggaatctcttctttttctacaatcgagtctccttttacaggtccatattttgttacgctatcgaccggtggtctaactacatctcctgtttctggattcttaattcctggtttacctggaacttcctctttctctcctgttggtaacttcggatcaaattcgtctcgatgacctggtgttatcgtttctggtccgtattctgttaattcattaatcggatcttttgtgatttcttctttcgattcacctttactaataatttctccagttaatggattttttagtgttggcgtcgttattgtcttctcacctttttgtccttctcttgttactttttctgtccctggtgctaaatccggattaaatttacgttctttctcgaatggaatctcttctttttctacaatcgagtctccttttacaggtccatattttgttacgctatcgaccggcggtctaactacgtctcctgtttctggattcttaattcctggtttacctggaacttcctctttctctcctgttggtaacttcggatcaaattcgtctcgatgacctggcgctattgtttcaggtccgtattctgttaattcattaatcggatcttttgtaatctcttcttttggttcacctttactaataattactccagttaatggattttttagtgttggtgtcgttattgtcttctcacctttttgtccttctcttgttactttttctgtccctggtgctaaatccggattaaatttacgttctttcttgaatggaatctcttcaacttttttttctaattctgttattgtttttggcgcttctggtgtaaaagtaaactctgaacctttcaagtcagttctcatccagccatttgcatttatcccttgattaaggccccatctttgactagatgtaattaagaaattatatgcctgatttttagataaacctaaatctgttattgaagtctcccaagttttaccagcatattctgctctcattttaccagttgaagcaacataagttaagatgacatcatttaaacgttgcccatgaaactttccatctgatgtattagttgaattgtccgcatagtttaaaaaattagtttttgatttatcaatattttctccaaccatttgtgaattaccagaactgtcatttttcacaaaagctccgtatcctctataaccttgtccagcttgcttttcagttttgtccatggaacttgtataaatgtatccagtatcaattttaaatccgcctgaatttaccagacctttatccccaaggattccaccattagttaaatattcttctgcatttcctttactaaataagaacccccaaccatcagcacctgtggtatttgattgatggttatttgccactctaactttaaaattgaaatccttactaaaatctattttattttttaattgtaaagctcctatcaaaccattactttcattaccaacattaaacctggttacctctgatacccctaaatctgttggttttttttgtatatcaacacttccgtaaccttcaaaatgttctttaccttgaattgtaattggggtagattcaactacatttttagaatctcttgtaatatcaaaagagccttcatcaacagaacgagcttttctaaccttaggtgtctctgcgttatgagtgactgacgatttcggctgaacttcagcaacatcagctacttcttttggtgtatcctccttttttgatatatcttcagcttttactgatggttcatgttcgattgtgtctttgtttgaagttacttcagatttagcttctacaccctgtggtgcagtgtctttgtttgttacttcttcaatcttcacttcttttgattggacattatcttttaatgtagttggattctcaatattgttttcagctgcttctgcctcttgttgagttcccaaatacattagtgagccaattaaaatagatgctgttccaactgtaaattttcttattgaatatttattcaatttatttgatagaaaatctactcttttatttaccggtcctttcttatctctcatttgcatactcctttttccatattttccactttacttacagtgaatttacatgtaattttacaaatacaataggagttgcacaatggaatataacacttatctttataaaattattttatatattgacgcacttaaaacaatctacaaataaaattattatttttagttttcaatgaataattcattcttatctgttggaaaaacccatcaactcaatagcattgaatttctaaaataaaaaataccttaacgcatttaaaaaatacatttaactgcaccaagatattaaaatctcgaaacatactttatgtttcattaatatttatttcactcaaaagatttttaatataattgtgttgttttacagaaacaacaatgattacatttctactatcatgtgggtctctacatttattcaagtaacccttttttgataaatcttttacgcttttaacaattctagattggtctataccgatataacttataatgtctctcataaaatatttaccttcatcatttttaaatacatctaaatatgctaatactaaataattatctaatgtaagacaaaaatatttttttaaatatttacgcagctcatatgtagttaatactcttttcattaatttaatattgctcttgcttttcaaatcattcatcaagtcttcatcccttacttttaattgtcacgtcaaataatatttgtctttaactagtaataactccaaatatatttagtttgtggtgctagctataaacacaaatgaatcataacactatattttgattttgttcaattgtttttatttttggataataaatgaatttttcatttgttattctgtgatttttagttatttatattttatatatattatatataaaaatatttaggttaacatgtcttcaaaagagattgcttttatattactttaaataatataaagtattgggacatcagaaaatagtaggagaatgtaaggtggactatcaaactttcgaaaaggtcaataaattcataaatgtagaagcgtacatattttttctcactcaagagttaaagcaacaatataaattatcattaaaagaattgttgatattagcatatttttattacaaaaatgaacacagtatttcactaaaagaaatcattggtgacatactttacaaacaatctgatgttgtaaagaacattaagtcactatctaaaaaaggatttataaataagtctagaaacgaagcagatgaacgccgtatttttgtttcagttactccaatacaacgtaaaaagattgcttgtgttattaatgagttagataaaataattaaaggatttaataaggaaagagactacataaaatatcaatgggctccaaaatatagcaaagaattttttatactttttatgaacattatgtactcaaaagattttttaaaatatcgatttaatttaacatttcttgatttatctatcttatatgtaatatcatctcgaaaaaatgagatactaaatttaaaagatttgtttgaaagtattagatttatgtatcctcaaattgttaggtcagttaatagattaaataataaagctatgctaatcaaagaacgatcccttgcagatgaaaggattgtgttaatcaaaataaataaaatacaatataacactattaaaagcatattcacagatacttccaagattctcaaaccaagaaaatttttcttttaaatttaaacagatttacctcttgataaaataaataagcaatcatactacttctcaatttagtataaataaaaatacataattaactttcttttgtttttatattatttcaataccctactatatatcacaacacataaattaagcatgacactcattcaatttagttcaccatttcgtgttccaattttactgagtatcatgcttttaatgttataaacctaatgctttaataaatcgtgttaattcttctcgcatactgtcatctttcaatgcatattctatggtagttttaacgaagcctaatttttctccaacgtcataacgttcgccttcgaagtcatatgcatacacttggttatcattattcatacgttcaatcgcatctgttaactgaatttcgttacctgcgccttctttttgcgtttttaaataatcgaaaatttcaggcgttaatacataacgtcccataatagctaggtttgatggtgccgtaccttgtgctggcttttcaacaaactttttcacttcatactgacgtccgtttttagttaatgggtcaataattccataacgatgagtatctgcttccggaacttcttggacacctataactgagtgccctgtttcttcataaacgtcaatcaactgtttcactgctggcacttcagattcaacaatatcgtcacctaataataccgcaaatggttcattgccgataaattgacgcgcagaactaatcgcatgccctaaacctttttgttctttctgccttacataaaaaatattcgcaagttccgttgaatactgaactttctctagtaattcagatttacctttttcttttaacaccatttctaattctttttgactatcaaaatgatcttcaatcgcgcgtttgtggcgacctgtcactataataatatcttcaattccagctcttgcagcttcttcaacgatatattgtattgtgggtttatctaagataggaagcatttcctttggcatcgctttagttgctggtaaaaatctagtccctaaaccagcagcgggaatgattgccttttttatttttttcaaagttaatgtgctccttttcctaagtattaaatctatgtatcaacgtcattttaacactaattagaacgccttcatagtgtcattgagtatgtaattatttcttgggaaatttgttttaattttaaaaaacaggcttacttcatataatttatgaaataaacctgtcaattttggattgattatgctttgtgattctttttatttctgcgtaataacgctaaacctaaaatgctaaataatccgccgaacaacatgccgttgtttgttgattcttctccacctgtttcaggtagttcagatttcttagattgtgcttttttagttggtaccactgctttaaccttttcattgatttcaataacaggtgttactactttaccttgttccactggtttagaaggttttttaggttcttctttagcaggtggtattggtttaccaggttcagttggtacctctggcgttggcggtgttggtgtttccggctcgcttggtacttctggtgtcggtggtgttggtgtttccggctcacttggtacttctggtgttggtggcgttggtgtttccggctcacttggtacttctggtgtcggtggcgttggtggcacgattggaggtgttgtatcttcttcaatcgtttgttgaccttcattttggccgcttacttttggaagtgtatcttcttcaaagtcaacactattgtgtccaccgaattgataacttggtttatctttatttgtatcttcttcaataatttcagtgtgcttattgaatccgtgaatatgtggcacactgtcgaagtcgatatcaatgatgttaccgccatgttcatacttaggtttgtctttttctgtatcttcctcgaatgactgattacctttattttgaccatgaatttgaggtacactatcaaaatcgatatctacgatattgccaccttgttcatatttaggtttgtcttcttctgtgtcttcctcgaatgactggttaccgctattttggccaccttcataacctaattcactcttaatatcaacgtggctattttcttcgatttcttcaatcacgtcataattcccgtgaccattttcagttcctaaaccagaatgagaaatatgatgattgttttcagtaatttcctcgactggtccttgtgcttgaccatgctcttcaggtaattcatccactaattcaatcagattactttcagttgtatattctttcgtatcttcaactgttgtatgatcgctcactgcgccagttacaataccttttgtagactcttcgtcaaattcaactaagttagactcagtagtaacctgaccaccacctgggtttgtatcttcttcatattcaacaacatcagcgtgatgttttgaattttcatgtgtagattcttcaaagtcaattggatttgattcctcagaggactcagtgtatcctccaacgtgacctgcttcgctatccacagcagtatggtaatcgatatcaatagctgatgaatccgtttcttctattgtttcaatgtatccatcaacatatccacctccaccatctatagctgtgtggtaatcaatgtcaagagttgatgaatcatattcctcttcaacagtagttactaaattcttatcatattgacctgtaagagtttctttaattgtatcttctttatattcaaatttattattttgaataatcggaccatttttcccatttccgttcgctttattactgtataaaactaaaccattatcccaagttaaggtatatcctctatcataataatacttataaagttgctctggatgtcctaccatttgtgttctaaaatcaacttcatcagtaccatttaaatactctccatcatagtgaacaacataagttttatctagattttctatattcaatgaatagcttccattattttgtaaattcaaattcccactcatattacttgtgacttctttaaatttagaagtatctgtcgtatttgcatatacactcttcgctatgtcttcattattacccaagtattcaaatatcctaacttttggttgatttccattctgattactacctttcattaaagttccagtaacagtcacacttgtcgttttaccattattaggtttaataaatgcaacatgcgaaaatctattattcgctttattaaatgtctcaatcgatccatttaaattggcataataattcccaataccatctttatatttaacatctaattcctttgaagtttgttcttcatttagtgttgaagttatagtttgatttccattagtttgtacagttttaggatcaataaataaattaatttctagttcagccgttacatcaaccttatcttcaatatcatttgtaaatgtatatctaatctttccaccttctaaaacttcacctgtcgccattacgactgaaccatttttaatttctggtacttttctagcagttgatacgccatgcgtatttacattatttgataaagtaaagtcaaagtagtcaccttgatgtaaaccattctcaaatttcaacttatattttagtaccgctcgttgtcctgcatgaggttctactttatttgtattgttatgcccctcaatagaaccaatttctactgtaactttacttgttacatctgtacccgtttccactttcgcgttactagcttccttagcttccgctacatctgctgatcttgtcacacgtggcttactttctgatgccgttcttggctgtgccacttcaacttgtgtttctgcgacttgattttgtgtagcctttttaggtgttaaatctacttgtctttgatctccgctattgtcttgagattgtgttgtttccttaacttgaggtttcgcttcttccttaactacctcttctttaactgtttctatatttgctggttgtgcagtttgtggtgcttgtactgcttttggtgcttcttcagttgttacttgtgttgcgtttgacggttgttctgttactgttgcgttatatgattgagtttcttctatatgattaacgttagttgcagttgtttgtgtttcacttgttttattatcagtagctgaattcccattttcttctactgtagttgtcttttgttctgatgctgcagcttctttgtcttgtcccatcccaacaacgatcattgttcctaagaatactgatgctgctcccaatttatgttttctaatgccgtacctaagattgtttttcactataatatctccctttaaatgcaaaattcattaattttttaaacttaataaatgcaagtctatattgttcggtttttaaaagcaatacaaaaaagcgagttaatgaaaagttaagattgtcattaattttatgttaattgataattttattatttgaaatatacctataaattgtattcaagtcatcagaaacccttgtcacacaaggcttgtattttttatacttatttttttaaattaaattcatcattatctaatttaaaacaatatactaaacgtttcataattatcgcctgtacaatacgcacaaaaacatgtcttgaaacgcctttcatcactctaaaatacccaatatactttttatatcgttcggattctgagtatttcagacgattttctgcataaaaataaacgtgtttcaaggcaatatattgcaattacctaaaaacacgtttacttaatatttagttaaacaaataagctaatgaataaaatgaagatgatacctgaaacggaaataatcgtttctaataatgaccatgttaagaatgtttcttttacagttaaaccaaaatattctttaaacatccaaaatcctgcgtcatttacatgagacaaaatcacactacctgcacctatcgcaagtacaactaatgcaacatttacatctgatgattgtaataatggtaagacaatacctgtagttgaaatcgcagctactgtagccgaacctaatgcgatacgtagcacagctgcaacaatccatgctagtaaaatcggagacatctctgtaccttcaaacattttagcaattgtatttccgacaccgccgtcaattaatacttgtttaaatgtaccgccaccgccaataatcaataacatcattccgattggataaatcgcattcgtcactgattccataatatgattcatcttacgctttctcattaatcccatcgtaacgattgcaaataatactgctattagcatggctgtccctgctgttcctatcatataaatgatagattcaaatagatttgtaggtttgtcatgcccagttacaagttgcgttatcgtagacactaacattaatatgactggtaatgttgctgttaataaactcataccaaatcctggcatctcttgatccgtaaattctttttgtgcacctaacgctgaaatatcgccttctcgtgtatacgcagacggaatcattttttgtgcaactttgttaaatataggccctgcaatgagtgtaactggaatggcaataatcataccatacagtaatacatctccaacatttgcctttaattcttttgcgatgactaccggtcctggatgtggtggtaaaaagccatgtgtcactgataaagctgttaccataggtagtcctagttttaacactgaaacatttgcgcgttttgctactgtaaatactaatggaatcagtaagactaaacctacttcaaagaacaatgcaataccgacgataaatgctgcaacaagcattgcccattgtacatgtttttgaccaaatttttgaatcaacgtgtctgcgattcgagttgcaccaccaccatcagcaagcaatttcccaagtatggcacctaaaccgaatatcagtgcaatgtggccgagcgtactgcccattcctttctcaatcgtctccataattttagtcaatggtatacctagcattaacgctgtaatcatcgatgtgataattaatgaaataaatgtatttaatttaaacccaataattaatactaataaaataacgatacctaaaacaacactgattaacggccatatttcgttaaacatgacattcccctctttctcttttcaatagaatgtaacaccgtcgtcgcgcacgtattccacataatatatagtagtcatggcacaacaactttatctaagatgcttgagtgacgtatttattgtgttttattttcagcgatatgttggcgttgaaaatctgcaatttgttcataattctctgttaaagaacgacttaaattgataaaaatggatacgatctcttggtaaacagtgacattttcttcaatcggcgtatgattgtttgtggcaccgaccatcgatgaaacgattgaaaaatcttcaatgtcacctacagctttaagtccgagcacgcaggcacctaagcatgaactttcataactttcaggaaccactaactctgtgtcaaatatatctgacatcatttgacgccatacttcacttttcgcaaaaccacctgttgcttttatcatcttaggtgtttcattcattacttcaataagcgcaagatagacggtatacaaattgtaaagaacaccttctaatgcagcgcgaatcatatgttcttttttatgagataaagttaaaccgaagaatgaacctcttgcatttgcgttccaaagcggcgcacgttctcctgctaaatagggatggaatattaaaccatctgcacctggtttaacacgctttgcaatttgagttaagacatcataaggatcaacaccgagacgtttcgcagtttcgacttcactcgctagcaactcgtcgcgcaaccatctcaatacgacaccaccattatttacaggacctccgatgacgtagtggtcctctgttaagacataacaaaatattctacctttgtaatcagtacgcggtttatctatcacagtacgaatcgccccagatgtaccgattgtgacagcaacttctcctttaccaacactattgacacctaaattagaaaggaccccatcactcgcaccaataacaaacggtgtatctttattaagccccattaatgttgcataacgttctttcatacctttcatcacatacgttgttggaactaattccggcaacatttccttggaaatacccagcagttctaatgcctcaacatcccaatctaatgtttctaaattaaacatccctgttgcggaagccattgaataatcaatgatatatgtatcaaataaatgatagaaaatgtatgttttaatatctgcaaacttagcagtacgttgaaatacatcttgccattcatgtttcatccaaaaaatcttcgctaatggcgacataggatgaatcggtgtgcctgttcgctggtaaatcgcattgccatcatgcacttcatttattactgttgcatattttgcagcgcggttatctgcccaagtaatattatttgttaatctttgatgttgctgatccatcgcaatcaagctatgcatttgcgcactaaatgacacaaacttaatgtcgtctttattaactttggattctctcataacatatttaatagtcattagtactgcatcaaataattcatctgggttttcttctgagacatcaacgtttggtgtgtgtaaatcatagcctatttgatgtttcatgataaaagttccattttcatcatataagactgacttggtactcgtcgttccaatgtcgacaccaatcatatatttcatgataaatccttctttctttcattttaattcaaccaaaatccttcaatatctttaccaacatcgtcgaaatttaaatgaaacgcttctttcaaaatttgactgtcgtattgttccactgcatcaataaacacttgatgattatgatgtatgcgttcaaaatcttgcgggttctgttgcatacgttgtcgcatggatgttaaaacgagtgccatcattactggttttaaatgactccaaaatgagtttaaatattgatgattagatgctttgattaatgtttcatgaaattcaaagtcatgcttcgtaaatgattctgcatcctcaaattttactgccactttcatcatttcaagttgtttcttcatttcttttacgatgggtagtcgctcttgatttttaactcttgaaaatgcaaatgactctaacatcagtcgcaaatcatacatttctttcttttcttgttccccaaacggcaacacatgtgcacccattctttctaattggatgagttgattttgttgcaataatttaaatgcatctcgaattggcgaacgactcacattaaattgctttgccatttgattttcagtgagtaacgtaccttcagctatgtgaccattcacaatgcctaagcgtaattctgccgcgataccttctccagttgtcataccttccaaccatttctctggatatccatacatcatcaaagtcactccttcattacacgacatacttgtatacaagtatgttaatatagttattatgagtttgcaagcgctttctttacgagcactaaaatagtgaccaccccttttcgatttaaatttaaaggaaatggtcactatcacacgaatgatttaattgttatgttgtatgtgggatatttctaattgttctgtactcatatgcgctttaggtacttcaatgcaataatgcgtttcatgacagtttggacattcgaatcgacgtgttgtcgctgtatgtttcgctttgataactgcccacaaagatggtgagaatatatgctggcagttaggacataaataggcaaccttttgttggtaataaaaagtaacaccaatgccataaccaatcataaatggtaaagcaattaaaaacggccatttatttttcatcaaaattgcacttataatgctagaatattgaattattcctataataccagcactaatccaaatgttacgacgaatacttttcatttcagctgatttactcatgacatgctctatgtcttttaagtgtgtgattggagacgtcgacgcttcatttacgtaatattgaacatttttaattttgtttaataccgcttgttgctgtttaacttgttggttaatttcttgttgtttcatagttagtaaagtattgagcgtcttcaaagtaccttcaccttttagcaacatatctatatcgcttaacgcacaacctaaatctttaagcaataagattaactctaatgtttgtcgctgttgttctgtatacacacgacgctttccttctgtaaatccttgtggtttcaaaatacctttgcgatcataatattgaatcgttcgtgttgtcacattgcataattttgcgagttctccagtcgaatagttagacatagattccacctcctataattaccatagttgatgacccgacgtcacgagcaagtacaatttccacattttaaagaaatttattatactaggcgtcttatttttatgatttcgtaccatgttgatttacaaactcactcaaactaagtaacacacctactaaacatctactctgttatttcagaatgaatttgttgtaatttatcttcaacttcagtaatctctgtcgcacattctttcagtaaatctcgatacttttccgtctctgcattgtttttataacgtattttatgttctaaacttgcccacatatccatacctatcgttctaatttgaatttcaacaggcaatacctcaacgcgttctgctaaaaagactggaatagatacaacgatatgtaaactgcggtaaccattttctttagggtgctgaatataatctttacgttttatcaattgtacgtcttcttgtttaagcaacatctcttcaatcaaataaatatcatctaagtaattacatactacgcgaattccggcaatatccagtatatgttctttggcagtttctgcgctaatctgtaatcctttacgattaagcttttctattaaactacgcatttctttcacacgtcgctccatatgatgtataggattgtgtttataaatgtgattgaaattgtcatctaaaatactcagtttagtgcttatttcctttagtgctgacgaataaatatgatctaactctacgaaacctaataacgtatcaaatgcttcatcaccattttcaaatttacttaaactatttttaaaatcatgtcgcaaatcctctaaatatagtgatggttttcgatctacatacatttttatactaacctccgatatataatcatctttattgtacctaacattttattaagataatactaatacactatcgaactttgggctgatactgaaacagcacaaagaaactcaaacaattcgaattatgtatcaaaaccttcaattacaggaagtgattttaaaatgatttaacgcaaaaaaacacctgttaccgttatataggtacaagtgcttaattgatagagatgttatacgtctttaaatgattccacaacttttggatgtggaccatccataagcggttctctttgtcgaacgccaccactttggttgccaattgattcgctatcaaagtacgatttatcttgatttgattgttcttgaatatgttcttcattatcagttgttgcatattcactatccacctctgttttttccattgttgctgtatggaattgtacgaagttctcttcttctaatgctttgatttcttctttcgataacgctcgataccaatctttcgcttttttcgccgcaataggaacaacatctttttcaagatatccttcttttaacattgcattcgcaatttctatcgctttttgccgtttaattacttcaaattctttccatttttcggggtaacctttcattgtaaagggcatttccttaacctccaatatgttataattcatgttatataccaccataattataaaatgaaacatattaaacacatttttttagactcccgtcataataacttcagacaaacgttagtctgacctgataaatatttaattttaaacgttcttgtctctctcacgaaaaccattgtgttgaatattcatcattgctgattgaatataattatactgtggtaaatctggtaatatctttatttctaattctgtatttaattcgaaatgcttagcgatgttttcaaatattgctaaatactcgcccattaattgttcatttattgtaagtctatcttcattagccatggctctatttaacataaagctaatttcttctaatgcgaataagctaggataataattttgaatcaatgtcttatcactaaataattcaccattagctgcattataaacttgcgtcatgttatttaatttcacagataggttcatagccgtgtttttctgatacacatcatctttatattgattttcagaaaataaataatgaaagagcgttgcttctttacgaacaacttcagccattacattaggaagcaatgcggatgcggtacgttgtccaaggacaaataaacctatgattgcaatcacaatacccattgcaacgtcaataactcttggaaacgcaatgttaattgttaaattctgtgatgctaatccgttcattaaaataacttgtattgtaataaaaactactgcaatcgcataatttgctcccaccaatgcttcagtaaacaatgctgcaatgcccattaaaattactgcaacaggtgttggtattgaaaacaacaatatgactgaaagtactaacacacctaaaatagtacctaaacctcgtgccatacctctctcgattgcatgtatagttgatgttcctagtaatattgtatgtgcagataacggtatccagtatgctttttcaaaatcaaacattaacgcaataaatatcgctatcatcataatcgctgtatatctcaatgtatttctaaaaacaatagagtctaatgttaaattttgataaatgcgtttactatataaaggttttcgcatgtctgcttcatacgcaatacgcgcttcatttgcatgcaccatttcatcaattttcaatatatggttgaataaattttgaaattcctctgttactgtcacttcttttcgccaatatcttacattttcctcactattatctagttgtgcaatgatatgatccatcatttcaattaactcatctggcaatggtcgaatttgtttagcgttcaactctaacagttcagaataaatcccttgggcagatgtgtgtaataataataatttttggaaacgtctacttaatttatcgttacttgaagtagaagtgattaataatttatcagatgctttaaaactatccaccgctgtttttgctacttgtaaaaaagcagatttatcattataagtgtgtaacaacttagatatgagtttaaaatcattttgaattgcttgttcttcagctttgtttttagaaaatacgatcgtgattaacaccatcatagtggcaagtataccgcctactaaaatcgcaaagcctctatataatgcttcttcgggagctataggtaagttaatgggtagactgaatgtcacaatgaagaatgtcgatgacggtccagctatttttaaggcagtaaatatataaaatggtataaccgtaacaattaataatgtcattccaaaaacgagtggcgttttggctgttagcgtaccaagcatcatacatattgcaaacgctaaattacaaattattacagttcgcagcttagatcgcgacggacctttaaaaacataaatatgggctagtgttccggttgcaactaataatccaaattggaaattaccacataagtaaccgattattgcaggaataatcattaacagtccctgtcttacacctttataaaagtctaagttaagtcgattgatttttatgagtgatgtcaaaaagatgtcatttcgacttctcctttccttgtcaaaatatttccataatctttttattagcatagttaaaatgaatttgttgctataaattttaattacgcaacatatgtcattataacaccttatgctcaattatctaaatttaaaaacttttaaagtccaattaaaattaatttctaatgttatttaacatcgttgaacctttggtcgcccacctttgcgctagttaaaatttatatgtacttttacaagcgttacctgactaatgttttaaaaccttatttctttacatatatcatttcaataacttcattttcatcttaaaccatatctgttttaaaaagtttcaatttcaacgcaaaaaaagcaataagccccaactatgtgaaagcttactgcttgtttaaattatttttctattgctttatcatcactaacaattaaaggttgatctggtttcacatagaaccacataatcacagcgattactgctggaacgattaacaattggaatgtcattgtccaacccaaatgttctacgaatagacctgctaatagcggactgattaatgcacctatattaccccataagttcatccaccctgatactgtaccagagaagttacgtcctaagtcagttgctgcagcccaactcatacccattgaaataccgataccaccaagacctagtgataaccagaaaatacttacatataaatttcctgtgcgtacagcaaagataattgaaactgcaaacacaataaatcctgcaattgcaattacacctctagctacgaattttgaacgacctaatcctaatacacggtcagaaattgcacctgctgataagattaagaagaacattaataaccaaggtaatgaactaatgctcatttctttaaagttaacgtggaatacttctgttaaatacgtcggtaaccaaattaagaataatgtaatgataaattgtacaacaaagtattgaattgcaattgcatagaagctaaaacgtttaaagaaatcattccatggtggtgatgacttttcagtagctacgatatcacgattttccataatgaaacgtttctccgcttcattaaccattctatgttgctcaggtaagtctttggcaataatcgcccataatacagccattaaaatacctactgcaccaaaaatgtaaaatactgcttgccagttaaatgcgttaacaatagcaattgtaactattggtgctaatacaggtccgaaatatgatcctgctaataatgcacttgatgctctacctttttcatttttagagaaccaaaatgaattaaacacagcattagaagggtacattggcgcctcacctacaccaaataagaatctcactaaataaattaaaccgtggttcttaatcatacccgttaagattgtaaatgcactccaccaaactaatgcaattgtaatcatcttacgtggaccgaatttttcagccaacatccccgatggtacttgcattaatgcataacctagagagaagaatgatgccaataaaccaaattgtggttttgtcatccctaaatcatccatcatttgcttagcgatatatgaaatgtttgctctatccatatacgcaataaccccaataaagaagaacgcaagcgcgaacatccaccttacgttagttcgtttttccttcataactattcctacttccctaattaattttttaaaacttaccctgaaacgttaaaattttcggacatctggcatgtccacccctactttgtcacaaaattgtaccaaagttattttttataatattatcagacatggaaagcgtttacaatagaatctataaaaattttattaaattccgcttaacttttgctattaaaacgatataaaggaacttttagttacatagtagcctatcgtttgttaattaaaaatactgcaatcctagtgttttaaaacgtatattgcaggctttcttacatattcgacattcattttaaattgcatataactacattaaccattcattgtgcagcgcctgttgtttagatgatcatttattgactttttgctcttatagcaagcaattttttgatttattgcttataatacattttaagacaaatgtttgtttcaacatcgcatgcgacatcattaattattcatttgaatttatccagtttctatttgtctgcaattgctgaaaattaaaggagcttatttttaataatggaacaaattatcactgaatttattagccgttttgggtatgcagccatttttatattaattttattagaaaatgtactacctatcgtaccatcggaaattattctgacatttgctggtcttatgtctgttaaatcacatttatcaattttaactttatttattattgcaactatcgcatcgtttatagggctgttaattttatattatatctgccgtttgatttcagaagaacgtctatatcgttttattgatcgacacggtaagtggattaaattgaaaagtaaggatttaaagcgagcaaatgattggtttaaaaagtatggcgtatgggctgtatttatctgtcgtttcatacctgtattacgtgtattgattaccattccagctggtgtaaaccgcatgaatgttgtgacatttaccgttatttcattaataggtactacaatctggaatttcggtttaattttactaggacgcactttgagcgatagctttggtatgttgatgactggtcttcatacatattcacgtattatgtatgttgtcatcattatcgcagtcatttactttgctatacgttacattggcaaacgtaagagagtaaaataatattgttgttagcataaaggcatgaattttaaatttctataaacaaaaagcagtgaatcattccatctattgaaatgattcactgcttttttaagtttatttggcatactttagctgaaagtcaactatctttatataaagaaatattactattaacatgatagttatagttgtgaagtaaaaggctaccaacggctgagaaatgataccaattaataatgcaccgacagtcattccaatatatctcacaaaattaaatacacctagcactttcccttttatatgttcaaaccttttagaaattatagtagacagcaaagctggcacaataccaacacaagtacctaatataaatataattactgataatataattacatttgattcgtttaaccatccaaacaataacgtaaatatagcaaatccagttatagtaacacgaagtatcattatttcattatatttttttgaaaatcgcttataaaataaacttcctaatataacactaacagtaataggtaaaaacaaaactcctgatattccaacgcctatatcataggtattatttaataatgttggtaaataaactaatattgaaaagtacgtaaaaaatattaaaaatcccaatgtcactaaagtaataaacactttatcggtcaaatatttttcttcaattttttcagttaattttacaatccctttttcaacatttggaatatcaataaaaaagataatcaaaaataatacgatagatataacgagcaaaaaactaaaaataccaatataatcccatcttgcacctaaagtactccctaagattggtgccaaagctggtgcacatgataaaaatatttgatagttcgccatagcttgagctctaccattatctgtacttagtttggctaataaagttaaagtcacgagaggaataattccgcaaccaattgcttgaaataaccttgatatagcaaataatataaagttatgtgtcactgcacaaataaagctagatatgattactattcccaatcccgttaaaagtacttttttcgaatcacgagaatctatacttctaccaagtacaatttgcataactgcaacgataaatataaaaccgccaactgtcgcatttatccaaaatagtggtacttgaaaatcgtcatatagtctcggaataataggcgtgtatatgttttgaatcaatgatgcgaaaaatgctaaaaatcctagaatatataatctgatattactattaatcatttaaaccatcttctttttttaattcttctatactacggtttaaaaactctataataactgccatttcatcatcatcaaagactttaagtacctcttcatatttttttaccgatttttcatgtaattcatcatgtatataagataatttttttcctttttgtgttaatgaataattaacttctcttttgttaaattcattgtgcgattcaactactaagtctttcgctaaaagtttttttatcgatttagtaattgctggttttgatacatttaacatttcagacaaaaatttattattcactttatcattattatcaatcaactctatgatatgaaattgtgttagagataaatctagttcctcattttcctttttatactgtcttcttttatcggcattttctctttctataataaattgttgtaattttaaaataacttctctcttcatatccactattattcctcctcttcattagttaaccggttaactatattattgttgtcactcccatttttgtcaaatattgttgtaattaacatatatttacttagttatgcaccatttattccgcatttcacaaatccacctataatacaaactatcattttaaataagcagaatttaccctgtcttccacacaaattgttttcgacactttaatgtgcctactatccaaaaaagttactcataacaaattgcgcattttaataaatgtagcaatgccatttgcatgctgcaaaaatactcgtattcatatttatgttttatattattaaagttttttaaatccatatttttataacacttgctatgtgataaaattaattttatatataaaatcttaagattcagattatttaatagcaaaggagatagtgatatggatgttttaacaatagaacatttaacaaagaagataggcaacaaaacgattctcgaagatgtatcatttaagctgaaacgcggacaaatagttggtctcgttggagcgaatggtgcaggtaaaacaactttaatgaaagttatattaggttactctagtttccaaagcgggaattttaatgttattaacagcaaggacagcaaaagcaatatcggcgcattgattgaaaatccaggaatatatccttttatgtctggatatgaaaacttgaagttattgaatgaatcaaaaaacactcaagatatcgataaaattgtctcacaacttcatatggatgaatacattcataaaaaagctaaaacgtattctcttggtatgaaacaaaaattaggaattgctatagcatttttaaataaacctcaattcattatcttagatgaaccaatgaatggcttagatccaaaagctgtgcgagatgtacgtgaattgattgtccaaaaagcgcaagaaggtgttactttcttaatttcgagtcatattttaagtgaattagttaaaatcacaaactctatccttattattaacaaaggtaaaattgttacagaaacatcggaagaagaacttaaacaatttaaagataatgatttagaaaatgtattactagaaatcatagaaagggaggaccaagcataaaatgggaactttaattaaacaagaatgtttcaaattatttaaaaagaaatcaacttttatcgcacctattgtctttattctactaatggttgctcaaggttatattgctacaaaatacaatgaaatttttacgccacaggaatctttcacatctgcttataatggtttttcatggtttgcatttttattaattattcaagcaagtacaatcatttcaatggaatttcattacggtacgattaaaaatttactctatcgtgaatattcaagaacaactatgattgttagcaaaatcatcacattatttattatttctttaatttattttgttattacaattattgcttcaattgttattgggtctttattctttaatgatttaaatatatttgaaagtagcggtaatcaattatctttattgaatcaattattattagttagtttaggcacatttgttggcgtttggttagttttaagcttaacgttgctattatcatctgcaacaaattcaacgggagtagccattgctgtaggtattgttttttattttgcaagttctattttagcagttattcaaacggcacttttagaaaaaatagactggctaaattggaatcctattaatatgatgaatattatgcttcaaacagttgaaaaaggctttagtaagtcgacaaaattagaacttcatgaattgtttattggtaatattgcttatatttctattttcttaatacttgtagtatttattttcaagaagaaaaatatttagtaacttaaagtattaaatgtctaaatacacacatattccatcgtaattcaaaatcattttcaaatcccttcacccaaataatggtgcggggattttttcatccaaattttggaaattccacattttacatatcgtaattttttaggaaactagtgaatataacaaatccctcctctcatttttaaaatagatatatcacttccccacttttacttaactaaactgcaacggttcctaataccaaaatcctgccctctatttttatcaattcaagcatacttattgaaaaatgttaacgttttcttgataatcattgtaagcgcatttattttataaactaacgtttgaaatatactacaggagtgacacgtaatgactcaaattactgaaaaagaattaaaaaagaagtatttagatttactatcccaaaattttgatactccagaaaaacttgcaactgaaattatcaatttagaatcaattttagaattacctaaaggtacggaacatttcgtcagcgatttacatggtgaatatgaagctttccaacacgtattacgcaacggttctgggaacgtgcgagcgaaaatcaatgatattttcaaagagagactttcaactaaggagcttaatgacttaactgctcttgtctactatccagaagacaaattaaaattgattaaaagtgatttccaaaattgcggtcaacttaatgtctggtatatcacaacaatcgaacatttaattgagttaattaaatattgttcttcaaaatatacgcgttcaaaactgcgtaaagcattgccaaaacaatacgtttatattattgaggaactactgtataaaagtaatgaatatcaaaataaaaaatcatattacgaaacacttgttaaccaagtaattgaacttaaacaggcagatgatttaattattggactcgcttattccgtacaacgcttagtcgtcgatcatttacacgttgtcggtgatatttatgatcgtggaccacaaccagataaaattatggatacactgattaattatcattccctagatattcaatggggtaatcatgatgtgctttgggttggagcctatgctgggtcaaaagtatgcttagcaaacttacttcgaatttgtgcacgttatgataatttagatattatcgaagacgcttatggcattaatttaagaccactgcttactttagctgaaaaatactatgacgcagataatcctgcttttaagcctaaaaaaagacctgacaaacacgaacgtttaactcaacgtgaagaaagtcaaattactaaaattcatcaagctattgcgatgattcaattcaagttagaaataccaattattaaacgtcgtccaaatttcgaaatggaagaacgtcttgtgcttgaaaaggttaattatgatacaaatgaaattacagtttatggtaatacatacccattgaaagacacatgtttccaaactgtcaatcgtgataatccagcagaattactacctgaagaagaagaagtcatgaataaactattattgtcattccaacaatctgaaaaattacgtcgtcatatgtctttcttgatgcgtaaaggctctctttacttaccatataatggcaatttactcattcatggttgtattccagttgatgaaaatggtgagatggaatcatttgaaattgatggtcatacttacagcggccaagaattattagatgtgtttgagtatcatgtccgtaaatcatttgatgaaaaagaaaatactgatgacttatcgacggatttagtttggtatttatggactgggaaatattcgtcactatttggtaaacgtgccatgactacgtttgagcgatactttattgcagataaagcttctcataaagaagaaaagaatccgtactatcatcttcgtgaagatgtgaatatggttcgtaaaatgctcagtgatttcggattaaatccagatgaaggacgcattattaatggtcacacaccagtgaaagaaatcaatggcgaagatcctatcaaggctgatggaaagatgcttgtcattgatggtggcttttcaaaagcttatcagtcaacaactggcattgcaggctatacactattgtataattcattcggtatgcaactcgttgcacaccaacaatttaacgctaaagaaaaaatactttccgaaggtatcgatgaactttctataaagcgcgtcgtagataaagaattacaacgtaagaagattcgtgataccaatattggtaaagatcttcaagctcaaatagatattttgaaaatgttaatgcatgatcgttacttagactaaagacgacatttgatgcatgtatcgtgcacttatttagtggtactgtgtttacgcattggctacgcaaacacgatgataaataggcgacctagctacaccgaaaaaaatcccctcactattgcgagtagtgaggggattggtgtatctatgctaattcctgttaactgtattataacaactttacagcaaaaaaatgcaaaatcaactaataaattaatgaaatgaccgacaccctcgcttctactccaatttaacaaaatactatattagtactatatttttcattaacatgtatgttacattttctatattacttaaaattacgaagggacatttttaaatcatgcgtatcttaaaagagtccattattgtggcatttgcctttgttggtgttgtcgttggtgccggctttgctactggtcaagaaattttccagtttttcacaagtcatggcgcatatagcatttcaggcattattgtaacaggactattgattactttaggtggaatggttgtcatgcatacaggtcatcatctaaagtccagaaatcattctgattcaattaactatttcttatacccctctattgcaagaggttttgatattattttaacaatgtttatgttgtctttagctattattatgactgcaggtggtgcgtcaaccattcatcaaagtttcaacttaccgtattggctgagcgcactcatattagtcgcctttattttagcaacactgtttctaaaattcgatcgtttaattgctgtgcttggcggtgttaccccatttttaattgcgattgtcattatgattgcggtctactatttcacaacaagtcatcttgattttactgccgctaataatgatgctcagattcataagcagaaatcattatcacctggatggtggtttgatgcgattaactatgcaagcttgcaaattgctgctgccttcagcttcttatcagtgatgggtagtaaagttaaatatcgtgactcaacgttatacgggggcttgattggcggtttaatcattacatttttactcatgatgattaatctaggtttaatttctcaattcgataaaattaaacacgtagatctacctacattaaaattagcgacacaaatgtctccgtcaattggtattattatgtctgtcattatgatacttgtcatctacaatactgttgttggattaatgtatgcatttgcgtcacgtttcagcgttccattcagcagacgttacttcatcattattattacaatggctgtcatcacttatattagtacatttatcggtttcatttcattaattggaaaagtattccctattatgggattgttcggtttcatcttactcatacctgtactctataaaggtttaattaagcgtattaccggcaaatctcatatcgattaaaatatctatactattgtaaaatttagtacagcacttcaaaatcaaaaaagcgggcagatgaaaagtaaaaatcttttccatctgtccgcttcttaatagaactgttatttcccaagtatttgttgaccagccgttaatccagtttctgtaatttcatggcccttcacccaaacttcttcgacttgtgccccacgtgtattaaacaagttaatgacttgttcacttgcagctaatggcacaattggatcatgtttccccatagaaagcaacacactgacatctgataaatcctttgttgacgttacttcaactgggtataacggtgcatataacaatgcttttttaaatggtgcttctgaacgcaacattaagttaatcgctatatttgatccatttgaaaatccaacaagtactgctttttcaatatcaaaatcataacgttcagcaacttctttaatgaacgtcaacaattcttgtccacgaaatgccaaatcttcttcatcataaacaccttcaccaagacgtttgaaataacggttcatcccattttctgaaacttgtcctctaatacttaacaagtgataattttcattcaatgcttcgcctaacggtaataaatcgaactcatcaccacctgtaccatgcaataatattagtgttggcgcaccattttgtccttctctaaaaatatgttccatcacaaatcctcctcattccaattaaccatgttgacgcttcgtattaaaaggtctaacttccgattcaatatattctcttttattttctaaaaatggtggtaaggataacccttcgcctaatgtttcataaggttcatcttccataaatcctggtccatctgttgaaatttctattaaaatatgccccacacgtgcatataatgcttcaaaatagaaacgattaacgatgcctgagttattaatacctacctctttatatttcgttgcccacgcttctattgcatcatgatctttcacacgaaatgacacatgatgtacctcaccataaccttgacgtgctgctggccctttatcatcttttattaagattacctggccaccattgcctccttcgccaacttcaagtaatgcgacattatcttcatgcgcaatagttgtcataccgtaaacagtctctaaaatatttttaaagtcgtcaaaataacttactttaatttcaatggggcctaatccataaatcgctttatctactggaaccggtccattcttccaaggtacaccaggtgctaccccttcatttaactcatctgaaattaattgatacacttggccatcgacttcttcaaatggcaacacttttttaccaaataattcttgaataccttcgtgtttaacaccaaactcatcaaagcgctgttcataatatgttaatgcgtcatcgttaggcactctaaaagacggtcttgtaatggaatttgttcctgcctgcccttttgtaatatttggaaaatcaaagaacgtcatgtctgtacctgccgaacctacatcatctgcaaaaaaagtatgatacgtataaatatcatcttgattgactgtctttttaactaaacgcatgcctagtacttctgtaaaaaatttataattacgttctgcatcatctgtcattgcagtaacatggtgaatacctagtaattcatgattatttatcattttatataccctctttatatttttagtgcatttatctcgaaatcgagatactttaatgtaaatttttagtgcacgccttacacttctgtagattgtgcacttagtttcttaaacgcttgttgtaagattgttaattcatcctttgttaacacatcaaacgcttttgttaatgtctcagcatgcttagggaaaatatctgccatttgactttgacctttttcagttaaacaagccatatatacacgtttatcatctttatccttttcacgtgtaatccaacctttgtcctctaattgacttacaacatatgaaatgctgctacttgcaattaatacgcggtctctaatacgttgaattggttgcggacctttattataaagcaactcgagcactgcaaattcagtaatatttaagccatatcgctttacgtcttcttttgtaatttgctctaatgtgtctaacgccctattcattccgacaaaaacattgagagattgtttcgttcgatccatatgatcaccaacttttttattttatttcgatttcgagataaattatatagctgaatagatttaatgtcaagatacgtgttttcatcttcatttcaaactgtgcttaataaaaacgactacatagatgtggcaatgtcgtcacatgactgtcatgcacctttgacttcgtttaagttaaaatagaatagggaaatactataatcaatcatgataggagttgatatgtatgagtaaccttgaaatcaaacaaggcgagaacaaattctatattggtgatgatgaaaataatgctttagctgaaatcacataccgttttgtggataataatgaaattaacattgatcatacaggcgtatctgatgaacttggtggtcaaggtgttggcaaaaaactacttaaagcagttgttgaacacgctcgagaaaataatttgaaaattattgcctcatgttcatttgccaaacatatgttagaaaaagaagattcatatcaagatgtatatcttggttaaataaattttgcgatggtgcaactgtaccatcgcttttttgttcgcatcaatataaaattgcaaaacgactagttattttgcatttcaaactttatgctatcaattcattttcttttctggtatactttttatactaacttatagaaaaatagaaaaagaggcgatgcataatggcatttcacgataaaacagcaacacaagtgacaaacattgtactgaacgtaagagacttagacttaatgacaacattttacaaaaacattttaggactatccgttaaaagttctgacgataatacaaccgtattatctgttgggactggtggccatactctaacgttacatttattagaagacggccgtcagacttccccacgtgaagcagggctttttcatatagcatttttattaccaactactgaggatctagctaacttcttatatttcgtggcacaaaaaaatatgggcatcggcgctggtgatcatttagtaagtgaagctttatatttcaacgaccccgaaggtaatggtattgaagtctatcgcgatagaccttcatcttcatgggaatggcaaaatggcaaagttaaaatggatactttagaagttgatagccaaaccttattaacacatcgtactgatgaaggttggcaaggaatgccagcaaaaggcatgattggacacttacatttaaaaacacatgatttagacgcagcatatcaatgttacattgaacaattaggattccaacatgtgtctgattttccacgtgcgctatttatgtcaacgaatcattatcaccatcatattgctgctaatacttggcaatccaatcaagcaagacaaaacaattcacaaagttatggattaacacatgttgatatttatcaacccgacgcctcaacacatacatttacggcaccagaagggtttgacatcacagttcattcaaatactgaccttgttccagaaaaataatcatccatactttattaatacaattttttcacgcaaaagcctgcgattcatttatgtaatcgcaggcttttttattgctaactttttaattttatatatttagacatacggtattctatttattcttttggtccaacccattcaataacatcttcataagcttggcgtgttttatttttcggtggctcttgttgtctgtagccaaatgcgaccatcactgataaaccaaattgctcagtatctaagatccctttatttgctaaaatgtctgtcactgtatccagactaaaaccttccatcggacatgaatcaatacctaacaatgcggctgtcgtcatcatattgcctaatgcaatatacgtttgtttacttgaccagtcatacaaggcttgatcattatcagaaatatggaaatctgcttggaatgcatcgaatttttgttcaacagctggaatcgtttgtgcctcatattttttaatatctcttaacatatgttgtacatacggtgatcttgacgttacatttttacgcgcaaaaattagcacaaaatggctcgctgtatctaattgttttgctgcgccccaactgtgcgcttttaattcatcacgtaacgcttgatcttgaatcacgacaaacttccaaggttctaacccaagagaacttggagacaatctacctgactctaatattgtttcaaaatcttctttcgaaactttcttttgtggatcgaattgcttagtcgcatgtctgaaatgaaatgcatccataattgtttgattcatattgctcattgaacatagcctcccatttttatatttattgctatacaaattatacttcatgttttaaaaagactaaagtaatccgtttgcaattcactataacttgtgcacatgttataagttttctgcaataaaacacacttttgaattttgggaaatttagtgttataatatatttgtgatatttttcacaattaaattgtggcgtgattttaatgtgcataatctttaatttcactcatttacttttcaatcttttaaaagcgaggtttttaataatgacaaaaattatgttctttggtacgcgtgattatgagaaagagatggcattaaattgggggaaaaagaataatgtcgaagtaactacttctaaagagctattatcaagtgctacagtcgatcaattaaaagattacgatggcgtaactacaatgcaatttggtaagttagaaaatgacgtttatcctaaattagaatcttacggtattaaacaaattgcacaacgtactgctggatttgatatgtatgatttagatttagctaaaaaacacaatattgtgatatctaacgttcctagttattcacctgaaacaattgcagagtattctgtttctatcgccctacaattagtgcgtcgcttcccagatattgaacgccgtgtacaagcacatgattttacttggcaagcagaaatcatgtctaaaccagttaaaaatatgactgttgcaattattggtacgggtcgtatcggtgctgctacagctaaaatatatgcaggatttggtgctacaattacagcttatgacgcctatcctaataaagatttagactttttaacttataaagatagtgttaaagaagctattaaagatgccgatattatttctttacatgttccagcgaacaaagaaagctatcatttattcgataaagcaatgtttgatcatgtgaaaaaaggtgcaatcttagttaacgcagcacgtggtgcagtcatcaatacacctgatttaatcgctgcagtgaacgatggtactttgttaggtgctgcgattgatacttatgaaaatgaagcagcatacttcacaaatgactggactaataaagacattgacgataaaacattattagagttaatcgaacatgaaagaattttagtaacaccacatattgctttcttctctgatgaagcagtacaaaaccttgttgaaggtggtttaaacgcagcattatctgtcattaacactggtacatgtgaaacacgtttaaattaatatatatatttaaaagcaaaggcgcgccatgtgcctttgctttttattttgtatatctgtatcaaaatcgatttgattaaaatccgctttattttatcatctattcaaatgattttagtgcgcttattttactatggcattattgcctaacctgtttgagatatattaatatttgatgattcgtattcaaagttttcatttaacatgtatttagtatcatgatagctgcttcattgatgatatactacctactttttcaacacttcttgttcgataatcgttaatacaccctgcttatcattacttggagcgacagcagaggcaatattgaacaattcttcatcatgactattttccatcacataactatgcttagcgaacgctaacatatctttatcattattcgcatctccgaaggccatgagctctgaaggagacatttcccatttatctaacaatcgttttaatgcctgccctttagtcatgtttggcataataatatcaatgctatcgttcccacttgagacaagtttaatatcattgctgaattgcgttgctacttcttcgtcaacattcggatgcgtctcacgattaatattaaatgctattttgacataatcatcctcaggtaattgctgtagactgtcaatttcttttaactgatgataataaaatctcgtatcttctttaaacgcttcagaagtatgttttaaaatatacgcgcttttcaaaccacagatgacgagttgatcaatactttgcttcatatttaagtaatcgacaacctgttgaaacacctgacgattaaagcttttataattatataactcattgccattataaataactgcaccattttcagaaataaaatacatatctctatccccgaaaatagacttcaacttcgcatattgattgccactcgcagcaataaatgtaatatctctatttctaagttcagtaaaaatcgcttcaaatctaagtttatcatatgtcttttttgaatctaaaaacgtcccgtccatatctaccgcaatagccttaaccatgattatcctcctcattgctcttttagtcgtcttcattatatccatctcatgacaagcaatgaagtttgtcataccacaatgaacctatattcacattttgaaattgctttcatatatgcaaaacacattacactggatatagcattcagaggcgaacataaatttcagaatattgtaaaaatataacgatatatttatcatttagacaaaatatagtgtgatatactaatttataacatctatacataatgtgaaagaatttttaaaaatacaattaaatatcggtgtaataaatccctttatacataggagttgtatacatgaaactaaataactattctttaaaagttaaaaacaaacaactagttgacaattgtgatttaaatttctatcttggtcagatcaatcacattgttggtaaaaatggtgtaggaaaatctttattagctaaagatttcttactaaataatagtggaaatatccctaagtccatttctcaaaatgtaaccttaatatcaagttcatcaaatattcctaatgatataacaaaagattttttattatcattgttaaaatcaaaatttgaaaacaatcgacaaacattcgataagatttataacatactaaacatcgaagcaataccgtctaacgtactactaaaaaacttgagtgatggtcaaaaacaaaagcttaaattattaagtttcttattggaagatcatgatttaatcatattagatgaagttacaaacgctttagacaagaaaacagttaatgaaatttatgaatttttaaatgattttattcaaagccatcaaactaaaactattatcaatattacacataatttatccgatttaagtgctttgccgggtaaatactttatttttaaagaccttcaaatagaagagtaccaatcaaaagaagaagtcataaatgattacattaatttataattgaggtgtccactttgaaattagaatttaaaaaaagtatttccaataaaattatttacacgcttgttgtgctattcacattccttttcttacttgggtattttttaccaataggtatagacaaagttaaaagtttaagctatagccagtttttcttcagttcatatactgttgcaacgcaattagggttcttactattttcatttgttattgcatattttattaataaagagtattcgaataaaaatatcctgttttataaattgattggcgataatatctttaccttcttctataaaaaggtagcagtgttattttttgaatgtttagtgttcataattctaagtatcactattatttcaattatatattcggatttctcacattacttactattaataatcttattttcactcgttatcttacaatatatcttagttgttggaacgattagtatggtttcacctaacattttaatcagcttaggtatcagcattgtatattggattggttcagtcatcttagttgccattaataaaaatatatttggtatcgttgctccatttgaggcgagcaatacgatgtatcgtgccgtagaaaaaatattgaataacgagtcaacatttatgtgtcctactgaaattataaatatagtatcattcttcgttcttctatttatagttaatactattgtcttattactaagtagaaagagatggttgaaaatcggtatgtagtataaaaaaggagcggtatacattgccgcttctttttattatgtatttttacaatctccaccaatgacacgtcgtcattgctacctcataccaaacaaaaaacagtctcgcaatcaagactgttttccactcaatatattcatccattagcgtaatagattatttgacttctgtagctacaaagattttacgtttttcccaaacgcctgtcttttcattgtaatcatcacaagtaattaatgttaattgtttatctttacctttttgttcatctagaactcctacatctgtaggcttaacatctcttatacttgtcattttatacttacgtgtttcattaccaactttaaagtacaccatactaccttttttggctgctttaagatttgtaaattgatagttcggacggtcaatgaaagtgtgtcctgcaattgaaatattttgatcatctagtgattcattttcttctgcaaagcttacacctctatttaattgttcaggtgttgctggtcctggatatactggttctttaatatcagcatctggaatttcaatatagcctgccactttcgatttatctttcggaatttgaggtttagcttgctgctttttatctttactcgcctgttcttttacatttttatcatattgttcaatcttttcatctttatctttatcgtgaagataattatcgatatgtggtttagcaaacaaatatgctgccactaggataagtaccacaccagcgattgtcattaatcgatttgtccattttttcatacgttaaggctccttttatacatttcacaatgcctgttaacatttcatatagtataccattaatttcaaaatgactcatagcaattcattttatactataaaatttacatgtatacttttacgttagatttcattacacatatttgcattcaaataacgaaacgcttttaataattactaagggggaattgatatgattagatacgctaaaaaagaggatttaaacgctatattagcgatatacaatgatgccattatcaatactacagctgtttatacttatgaaccacaaaccatagacgaacgtgtcgcatggtttgaaacgaaacaacgtaagcatgagcctatctttgtatttgaggaaaatggaagtgtcttagggtttgcgacgttcggttcatttagaccttggccagcatacctatatacaatcgaacattctatttatgtcgatgcttcagctagaggaaaaggtattgctagtcaattactacaccatttaattgtggaagcaaaagctaaaggttatcgtgcgctagttgcaggcattgatgcttccaacaaagcgagtattcagttgcatcaaaagtttgcttttaagcatgccggcacactgaccaatgtaggttttaaatttaatagatggttagatttagcattttacgaattagatttacaagactagtaatgtttgaatcacataatataaacaagacaaccatgttaattcccttaacataacaagccaacatataaaattttaaacttctcaggggagtgggacagaaatgataaagagccactaatgatttattatgtagtggttcttacacattagccacagctaatgtgtacttaaaaataggaatacatgagtaaaactcatgcataagaaatactaatttctatagaaaaagtatttctttatcgtcgtcccaccccaactcgcacattattgtaagctgacttttcgtcagcttctgtgttggggcccaaaaagcttgttacaagcgcattttcgttcagtcaactactgccaatataactttgtagagcatattacattgatttacattgtcccttttatttattcttttcaaatactatccccatagctttgatttaacgctttttctcaataacaaaacgaatatagtagaacatgaaaacgataatcatgctgagcgataaagatttaaataatagattgacccacgttccctcagtcgtatatccatatgtaatcgttgtgttaatgatgaatgctataaagatgattgatagtcttagcatatcatcactccttttaagttattttagatatacgggggcgcttttgcaatcactattttgattagtatgcattttccataaatctttcaacttcttcagagataattaagaagcatctatctggtactaatgatccagacagatgcttcttttttatcaatattttattgttatctcattaattatttttaaccatatcttcagctgtgccaaagattttacgtttaattgcttcgccagttggtgtgcctgctagtccacccaatccagtttcacgtaatgatgcaggaaggttacgaccaaccttatccattgcttcaataacttcatcaacagggattctactttcaatacctgctaatgctaaatctgctgaaattaaagcgttacccgaaccaattgcatttctcataacacaaggaatttcaacaagtccggctactggatcacaaactaaacctaataaattacttatcgctaatgccatagcgtgcccggatgcttctggtgatcctccgaatatagctactgctgcagctgcggccattgcagatgctgaaccaacttcagcttggcagccacctgttgcaccagctacacttgcattgtttgctacgacacgcccaaacaatgctgaagtgaataagaaatcaatcatttgctcttctgttaaatcatgtgttttttctaatttaaaaagtgcaccgggaatggtacccgaggaaccagctgttggcgttgcacaaataatacccatcgcagcattgacttcatttgttgcaatggcacctttgactgcgtcaatcatttcatatccagacaaagcatgatgtgtttcattataatcacgtagtttagcagcatcatgaccagtgtagcccgttacactttcaaccccatcacctgtcgtccctttgattactgcgtctcgcatgacatctaaattttgtttcatttgcgctcgcacttcatcacgtgatttaccgcttaattccatttcttctttaaccatgatatccgcaaatgacatattattttctacggcataatctatagtctctctaattgaatcaaacatgtttattccccctctaatttatataggaaacgtttacgtcactgtatttctctttaattgtatttaatgttgattctgagattgctttatttaatggtattacaaccaagcatttatcttcatctatcttaataaattcatctttacagtctaatttcatatcgttgatatcattgatgaaatgatttacttgtgctttagtcatatttccgtcaacaactaaaattggtaatccatgatttaaatctacttctagtccatttatatgaatacctttaattttaattgtaccaccaccgattgaaataccgataatttcaatgtagcgaccatcattacgagatgatttgatataagcacagtttggatgttgaccaatactatcgccttcttcttcgatgatatctattttaataccatcatcagctgcaatttctaatgaagatttaattcggttatcaaatgttgaatatcccattgctccacccacaatagcgacatctgtaccatgtccttggtgtgtttgagcaaatgattcataataatgtatttcaatatttttaggaatatctcccaatattgcgcgtgctgaattcccaatctttactgcaccagccgtatgagaacttgaagggcccatcataactggtccgataatatcgaaagcactttgataatcatagctctttgccataattaaacactctccttaatatgattctttttgctcggcattttaaagttgatattcattaaattaaacttattaattagtgttccaataatataggctaagacaatgctgacaataatcactgttgcgattgttacaattgatgtcactgcattattaaagccaaacaatacgatggcgcctgcaattggtgttgccatacctttgacacctattactagtccgctaaatgtcacgatacatgcgttgacgaccccaatcagtgcatttgtaccatatagttgtactggatattgcgctattaaatcaatttgcgtcaatggctcaatacaaactgcaaatgcttttgacggtccaccaatgtttaattttcggaataaaataaggttaacaaatgagctacctgtacatgttagtgctccaatagccataggaacacctgtcagtcctaataaacttgttaataccattgaacttagcggtgtcatacctgtaacaggaatcactagtcctaaaatgaccgctaatgcatatggattgttatcacctaccgcagtgacagcactacctatttgttttaatgttgctagcacaccaggtgtaatgattgatgcaagtccgaaagcaattgctggtgcaaataagatcaccacaattaagtccaagccttctggaactttcttttcaatccatttaattaaaaaagctacgccataagctgcgatgaatgctggtaataatttaaagtcatgtaatactaaaccaacaatgaccgcaaatactggtgcaacgcctaagtttaagcacgttagaatacctactgcgataccgcttaaacttcctgctaaatccccaatatcttgtagaaatttaatatcaaatacgccaccaatagcataacttaagaatgcttgtggtagaaatgtcgcacaagctgcaccggataatgcttgtagtccttgtttaccgtacggtgcatactttaaaaatagcgtcatgatcactaaaaccaagactaatgtgcctacacctaacagaatatccatttcccaaaaacctctctctatgtttattttattttcagaccataaacatcgtacacctttaagaaaacgttttcaacttttatctgttatcaaatcaaatatttaagtgaaatatttgatatttgtgaaagatttttaaaatggattgtttcaaaaactacttatgttgtcgttaatatttactaattaactttttactctatatttcaaacagttgtgtgacagttttttgataacttttttacatctgaaagtaagtaatatttctaaaaacttttaatatttatacactttatctttcgagctatttattttttgtttttgtgctgtgtttataaaaccgcacactatattcaaaaataacttattacacatatatttgcaataagataattaaagtaggatattatttttagttttctgataggaatgatgatagtctataggttgaatctttacttttttttaaagctaaatttacatcaacttaacaatggttggttatactgaagatgaaaatatttagtataacttagtggaggcgataaaggtgcaattgagtcattccgttaaagttgcaatttctatctatttagcacttatctttataacgttcacttcttatttagtcattattttatatacgagtatgactggacatgatgtatcacatttcgtgttagatagtcagcattctcatcatggatctcttacgcaaaaacatttgagtcttcctgaaatctcatttaaatagtttatcctctgtgtttcaacattcatttcccatatcgattcatttatctatcatctagaccactacatcttagatgatttttttattttctcatttcactctttcttaaaagtcgatataatgaattaaatcattatcatacaccgacatattttatgttgttggtgttaagttttaaaggggtgagatacttggcgaataatcattcagctttgcgtttaaaaggaattatacttgccattgtcggtgcttgtttatggggattaggtggtactgtttctgatttcttgttcaaatataagaatattaatgtcgattggtacgtcactgctcgacttgtagtcagtggtgttttcttacttattatgtacaaaatgatgcaacccaaacgttcaatatttagcgtattccaagatcgacgtatgttaggcaaattacttatcttcagtatactgggcatgttagtagtacaatatgcttatatggcatctattaatacaggtaatgctgcgattgcaacattactacaatacattgcgccagtttatattattatttggtttgtcataagaggcgttgcaaaactaacattatttgatgtgcttgctattatcatgacactattaggaacatttttattattaacaaatggttcattttctaatttagtcgtcaatcctgcaagtttattctggggtattttagctggtgtagcactcgctttttacacaatttatccttcagacctacttaaccgcttcggttcgattctaattgtcgggtgggcaatgcttatttctggtgttgcgatgaatttacgccatccaatttggcacattgatatcactaaatgggacatatcaattatattatttttaatctttggtattatcggtggtaccgcactcgcattttatttctttatcgacagtttacaatacatatcagcgaaagaaacaacattattcggaactgttgaacctgtcgtagccgttatcgcaagcagtctatggttacatgtggcattcaaaccatttcaaatcgtaggcatcattcttattatgattttaattttattactatcacttaaaagacaacctgaaacattagatgaataagaaaactctgataatcactttagcaagtaactattatttaacaacgtagttaccttataggtgatatcagagttttttattttagttaataatatttttcacttggtataaaaagcgtcgtcgctctggtatcggaaatactggataaatatggaattggtaatatccaggtataaagtcatgttcgatacctttcgcactcaacaattgcgataagttcaaagcatctgggtacagtacttcttttgtaccaacagttaatgtaatacgacctaaaccatctaagtcaccattaattggtgatactttgtagttatctaaaggtgtgtcccctgcccattgttcagctaagaacacactgccatccacacctaccattgggtctttctttaagtagtcaggaatttcaggatgctgcatcgttgcatctaaaactggtgaaattaatacaatatgtcctggttgcacaatatgtttttcttttaacaattgagcaaatgataaagcaatttgaccgcccgcagagtcacccattacaacgatttgtttagaatctgctacttgattcaataaatcatggtacaacttttcaaaaagcacatacgtcgcttgataatcttgatgcggaatcttcggatatactggcatgatgactttagcattgagtgtttctgcaagttcatcaataaattcgaaatgaattttgagtgggtcttggaaccatgcgcctccatgtgcatataatacaacgcgttgatgcttatcttgtttatcgttaacggtataaacggttgaaccgaagtgcttatccacttttactggcatcttaaactgataattggttccctcatattcgcctgctgtctgtggcgccattttttctaatgctttcatcgcttcttctttatacataaaacgacgcttagctctagataatcgtataccttgttctaacatataacttttcacactgcgtttttctttaattctaatatgtgcgtatgctgcaactaaaaatccaaacgcaagtgtagaccattttttacgcatttgtcgtcactcctctttgatgatttctactatagttctactgtaccatgctgattctaattactaccaatatttactgggaaataagttatgatgtctacataatcttagcaatgctaatcatttgcgatattaatgctcatcgacatcgttatttacactatcattcatttgcttaagatgatgttcaaaacgttgcatatcgataaaacgcccttgacgatgcatttcttttccattcataaaaattaaatccacaggtacagtgaaaatatttaattctccagcaatagcttccacctgactttgattaatcacagctaatggcacattgggatatgattgcatcaagtcttcaatttgtggtaaaacggcatgacacacgctacactgatcgcgcatgacatgtacaactgctaacggatattgatgaataaattcacggaatgcttcgacactatttaattgcttaaccatttcgaacaccttcttactttttatattttaaaatgaagtcattattttgttgctaaaatgtcttgaaacacttgtggcacagaggttatcttcttatcactcaatctgtaaaaaccgcctgtctgtgtaccaatacaatgcacgccatgtgcggacacaatttcaaactgaaacacccatttcatcttgcttgctttaactaagtaaatacgacctactggtttgtcatgtattgtgacaggtactttatactctgcttccgttttcataagtataggtgaaatgccttgattgatcattgttgagtaattcatgtgctgattaataaacgctgttctcaaatcttcgaaccatctaatataaacgatattactaacgacacccatcgcatcaatgtcgtaaccattcacttcgatttctttctctgcaactaatagaccttctgttgtcataatgacaaatctccttatcttacaaatagatttaaaatcatgttaatttatttttattactttcatgataaaaatacaagcaattgaactttattacggaaaatcaaacttttcaatgagactattaatttggctagtcgcgaagatgcatttttctaaaatgtgacaaaaacataagcaatgttttctatatctaacactaatatttaacttattatcatcaacacacctgctatacatcattgcgcactaaaaaggcagtagcttcattttaagctactgccttttgtaacgtattctctttcaactcgctacttcgcatacgcactacgaatgactaaaagttcattcatttgatatgctgtttcatttttaatcattatttgactgtcataattagcttacctggatcagcatcttgtacatcttcaatgacaagttctttattttcaagatttgtaataatcattggtgtaacgatgcttggtgcgtgtgctttcaagtatgctaaattcactttcattaatggttgaccttgtgttactttttcatcaacgttaatcagactttcgaatccttcaccattcagtttcactgtatcgataccaatatgaataagtacttcgacgccactttcagattctaatcctatcgcatgtttcgtagggaagattgttttcactgtaccatcaaacggtgctacaatttcacctttttcagggataaagccaacaccatcacccatcattttaccagcgaacacttgatcaggtacttctgataatggaatgatttgaccgatacctggtgcatagatgtctgttgttccaagtgcttctacgtgaactggttcatctgacatttcttcagtcactgtcgtttcacttggtttcgtaatttcaccactcataatcttggccatatcatgtttaatttgatctgattttggaccaaagatagcttgcatattgtttccaacttctaatacacctgatgcgcctaaagctttaatacctgctacatctacttttgatttatcaaccacttctacgcgtagacgtgtaatacatgcatctaaatgtttaatgttttcttttccacccattgcatctaagacatcaaatggtaattttgcgacactagagttacgaatttcagtttcttcatcttcacgacctggtgttttcaatttaaacttacgaattgcaaagtcgaataagaagtaatacacgatagcatatacaataccgactggaataactaataatgcgtgtgaacgatcccagtttaataaaccatataaaatataatctatgaaaccacctgagaatgtcataccaattttaacgcctaataaatgcattactaagaatgatgtaccagctaataatacgtgaattccataaagtactggtgctacaaataagaatgaaaattctaatggctcagtgataccagttaaaaatgcagttaatcctgctgataacattaaaccacccacgacttttttacgttctggtcgtgcatttttataaatagcaaatgccgccgctggtaaaccaaacatcataaatggatatttaccagtagtaaatgcaccagcagtaaatggtacgccatctttcaattgtgccatccaaatacgttggtcaccacgaaccaattcacctgcgtgatttgtataacttccgaattcaaaccagaacggtgaatagaaaatatgatgtaaaccaaatggaattaatgagcgttcaataataccgaatataaacgttgttaatgttaaatttttatttaataagaaattcgataaactatttaatccatcttgaattggtggccacgcaaagcttaaaagcacacctgttgcgattgctacgaccgatgtcacaatcggtacaaatcgtttacctgcaaagaatcctaaaaatggtggtagtgtaatattataaaatttgttgtaacaccatgcggctaaagcacccatgataataccaccaaacacacccgtttgtaacgttggaatacctaatactaaagcatgtgctggttctttcgctgcttgacttaattcttttgcccctttggcatatgagaaaatgtcatcaattgtaatgtgcaacactttccccattgttgcattcataattaagtaacctactagcgctgctaatgctgcaacaccgtctcctcctgctaatccaagtgctgtaccaactgcaaataataatggcaagttatcaaatacaacttgtcctgctgcttccatgaccgacgaaatcattacaatgatatcgttttttaaccatggtgcaatttctactaattgttcgttgtgcattgcgttaccaaacgctaataaaataccagctgctggtaaaatcgcaacaggtaacattaatgctttaccgatacgttgcaattgtccaaacaatttcttaaacatataaacatcccctatctcaatttccgcttccatgtacaaaaaaagcaggcatgaacaaacaagactattctcatagtgcggttgtttgctcatgcctgcattaccagtaacacgcaagtgatatctaattcatagctattatacatatttgtaaaagcgttttcaacaactttttcacaattttatcatcaattcagtacgatcatttgtgataaataaacaaaacggcaattcccattttgttgaaatagaaattaccgtttttatagttcaattcaattgtgataacctttaaatcagttataagaaacgttttgctgccactgaaattggtggaatttgatctaaatctaaatgtttatcttcagtaattgatctaaatgcccacttaccataaccaagcgcttcttcatttacaattttacctggtaatggcgcagcattaggatcaacatatacatctacaatcgttggtacatcttgtgctaatgcctcttcgactatagcatctacttcgctagcactcttaattgtataacctttaccacctgctgcctcagcaaattttgcatgatccatatcagaaaaatcaactgcatattctaattcaccagctgcttgttgttcatatttaataaatgctaactgtttgttattaagtacaaatacagttaaaggtaaatcatattgtactgctgtagcgaagtcttgcattaccatttggaatgcaccgtcaccagcaattgcgatggcttgtctatttggatatgcaatttttgatgcaattgcacctggaagaccgcaacccattgtacctaaccaacttgaaatgatgaacttgttatttacaccaaggtttaagtatcgagttgaccaaactgttgctgtacctacatctgctgaaatcactgcatcatctttaataaatttattgattgatgccattaatcgttctggacgtaatggtttactattattatttttatcttgttccatccatttatcccaaaccgctttacgttctaacgttttgtttaagaatggtctttcagcaacatgtttaatattttcagttaactgatgcaacgcaattttactatctccaacaattcctacattaatattgaaacgatgtccgatatttttaggatttgtgtcaatttgaatggctttaatatttttcttaggtaagtaatccacatatggatagtttgtaccaaccataattaataaatccgcttcctgcattgtttgataagatgttttggtaccgattttacctaagttaccgatactatatggatgatcatccggcaagattgttttagctggtaatgaatgaatgacaggaattttagccatttcaataaattcacgtagctcatctttcgcatgtttcgcacctacaccaattaacatgacaggctttttacttttattaattagtttaaccgcttttttgatgtctttatattttggtgatactactgttggtcttgatgtatctactggtttattcgttgtatctttaattttttcagttaataagtcgttaggacaaataacaacagctacacctttttgttcatatgccgtacgaattgcttcgttaacgatttcaaacacattgtcacctttttcaatttggtgattataaacggctacatcttcacataatttttgtaaatttgtttcttggaatgctttcgttccaagtgctgtactattcgtttgtccagataatattaattgcggtacattatccattttggcatcatacataccatttaataaatgaattaaaccagggccaccgatacttaatgccacaccgattttaccagttaattttgtgtaaccagcagccgctaagcttgctacttcttcatgacgtacatgataaaatttaaattgatctctcactgtacgtaaactatcgactactgcgtcgattgagtctcctggaataccatacaagtgatctatatcccatgcttgtaatgctttaactaatgcttcatttgcttttatttttgccattattactaatagcctccctttctgtctatcattttaaatatctaaattaatagaataataaaattagaacaggtattaacactgaactaataactgcagttaaaatcatcccaattgaactaaatgcaccggattcaatatccatttctagtgctttagctgtgccaaatgcatgtgacgcattcccatacgttaatcctttggcgatagaagattcaaatcttccaaatcttaataacatcgaacctaaaatactaccgattaaacccgttgtgataataaaaagtacggtcatcgtatctgtaccacctagttcatgtgacacttcgatacctactgcggctgttatagatcggggcaataacgttacaatgacgtctttagaatagccaaatgctttaagtgttaagaacactaacatgaaattcagcatgacgccagttaatacacttgcaaaaatgatagagacattgtctttaattttctctctatttttataaagtgggtacgctaaacatacgaccgttgcgtttaaaatatggttgatccaactgccacctttcatatacccgttataactaattccaaagataagtaagacaaaaataattcctaaagatgcaattaatgctggattcaaaaatgggttcggatatttttgttgtaaccttttagcgaaataatataaaacgacagtcaacaaaatcattaataaggcttgcacgtaatcattcataagcgtctacacctttacgatgtttatgtttaacagacattttttcagcaatataacctgaagataatgcaacgatacatgttcctatgataatgactgcgaaaaagagtatataatttagcgtaatttcggaagcaacatccataatacctacaactgacggtatgaagaaaaagaccatcgtctttaataaaaagtttgcaccgtcttctacccaagttagcggtacaatcttaaattgtaatagtaaataaaataaaaatagaccaacaatactgccggctaagggaagatgaaaaatcttttgaatttctgtgccaatataagtaatcacaatgatgattcctagttgtagtagtagtttgattattaattggactttgtgcatggcgccatccctttctaaatatgtctaaattgttacaataactattataaagatggcgtacacaatataaaaatactctttttttatagtttgtattactattttctatggaaacgctctctaaatttcacttcattttcacaaaaaaacactcattatttcaatgacccacgtaatgatgcgccttaaataatgagtgctttattaatatgttagcctaaacggtctttcaaaaattctatccatttcgttgtggcatgacttaattgtttatccttcttccaaacaacacctaattcccaatgtacatgagcatcttcaatgcgtagcagcttcacatctccatttagttgctctgaaattgatgttggtaaaatactaatacctaattcattcgtaactaaatcttctataacatgccattgtgaaatttgcgctacagtattcggaacaaagccaacgtttttagcattttcaataattttatcattcaagtaaaagtctttattaaataaaatgaagtcttcacctgctaaatcttcgagtttaacagtttcatattttgcgagtcgatgctctctgctcacgataagtcgcaaatcttccttatctagggtagtataatcgaaaatatgatgatcgactggcaaagtggtcacgcctatatctacttcatcattgataatttgctgttcaattgttttaccgccattttctatcaaattatatgtaacatttggatattgttgatggaatgcaccaagaatattgataagaatcttcatattcatgactgccgacatgcccatgtttatatgtcctgtttccagtccattcaagcgttccatttcagatggtaaataatcatacagtgcaacaatttctttacttttctcataaaaaatttgacctgcatcggtaagaattaaatgtcttttacttctatcaaataagggcgtgcccatttcattttcaatatctttaattgctttactaattgtaggttgtgcaatatataatgatttggaagcattagtcatgcctccttgcttaacgacttcaataaaatatttcatatgtttgatatccactaacatcatcctaactatttcaacacgtttatttcattatacacaacttcttaaacattcaataaatttagatttataaaattgctttataaaaagttttatgtaaaatacacattcttttatggtattatattaatggctcaagtatattaatcgaggtgaggtattgagcttttacgaatttatgcaaagttttcttggtgatgacacaccattaggtgaattggttgattggattaatcaagatagcaatttccctagagaagtgaagagccatagtgaaatattgtcatattttcgaacaaatccatgtcctgaaagcatctcagtacctgtaattaaacgggcactatcagttttcaaccaattcacaaatgtacaatgatacatgaatacatggagtcacatcatctcatgttagcgctctgattgcagggcgctatttttaatgttattgctacatttagtatattgtgattgctattttctttcagttatagaaccacgtacctttttttttaaatcattttatattttcccactaatatccgctgttaatcaatcctgacatccttgtatcactatgacaattaattgttaaatacatgaatttctacattttatgaaaaaatccatttttattacaattcaacactttatatgacaacttcattacagttacttttattgttgattgcttacattgttttctaaaaaaaatttgttatcataattaacgttgaataaagaaaaaaattaacttgggagataaaaatggaatataaaaagatactaattcgtttattaattgcttttgcagtacttttctcagcagatttcacttatcaatccgtcgaacaaacacatcaatcgcatgccgcagttaattattatagtaaaaaccaatgtacatggtgggcatttaaacgtcgcgcacaagtcggtaaacctgtttctaatagatggggcaatgctaaaaattggtattacaatgcacgtaaatcaaaatatgcgactggtcgtacaccaagaaaatttgctgtcatgcaatcaactgcaggatattatggacatgtcgcagttgttgaacaagtatataaaaacggtagtattaaagtttcagaatacaacttttatcgcccattaaaatacaatacacgtgtactaagcaaaaaggcagcacgtaactttaactatatttactaatcaaaaaacttctatcacgaacgcttcaatttcctgtatgcgtgtgatagaagtttttattttatgaaattatattattacttctacaaatttcaaattgccgtaattgaacgtatatttcttcttcaactattatttcatctttagcataatctatatataaaattttatgctattatttaaataattcgctataacttaacatacgttttcgatataaaccttgttctaaatctcaataattttttgctgttttcatcgtcattagttaaaaaaataatttaactgagtttttgagacctgtttaaattgatgactcaaaacctttatccccttttcactcggtttaattgctttaatatttaacacagtctcattgtaattttgctactaagtttgaaatatttcgattcgaatgtgaaacatcatttattattactttcgacagctagaaaaatattgttaaaccaaaactataattaccacttttatatagaactatatataaattttaactttgagacagaactgctagtcaggtttatgaatatatttctttagtttacttgatatacttattggtaaatcattatttatttgaagagcatttataacaaaaagtataatcccagttatagcgattccatgaccatttttatcagtcaaagattcatcaacaaaaactttttgataaatttatatatttgtataatttattatggtagatatctacacccgtatctataacagctacagttatcattgcgtcttatccaaatagtttttaagaaataaatataattcattaatatcatggctatttgtaacgtcagtgcttaagaccttgtcaattattgttttatctgtttctaagagcccctgattttctgcatacatattttgtatatcgctgttaatctcatttaattttttaaatttttttctaacctttttcaaaataaaatgctctttaattccatctcttaaatacatataaatctctattataatctccataaatgtcatatctcctctctcaaaaaacattatactcaatatattaaaaataagaaaggttttttcagaatttttagtattttcagatatttattcttaagtatcttattattacttctttttaacgctagtggaataattaataataattgtatttaaatgcaatgctgttgttctttcatacttacaagcaagtcataagaaatgagaaattaaattcttatatgatgaataaatgatgactgcagaagaaattgctaaaaaaggagtggagtgaggcattctactgttcatattgttaacaaatatcaaaatgataggaacttgaagaatctaagactgttaaaatcgagacaataagaaactcgttccaaatttgaatcctataatgaattcgtctcatgaagaagttatttacttttcattagactgatttactaatcaaaaaacttctatcacgaacgcttcaatttcctgtatgcgtgtgatagaagtttttatttttgttcatattaatttatctaagcgctacgatggactgacttaaacttttctttaaaatcgctattcgccatttactattgttgtctaatttcttgtaaaatatgttccgctgcttgtgtatttgcacggggttcttttttcaaagcttcagctactttagcaatttcatcaccttttgcccctacaacgatagctaatgatttatattgtaaactcatatgaccttgttgaataccttctgacacaagcgcgcgacatgctgcaaagttttgcgctaaaccaacggcagcaactacatgacctaattcttgtgctgactctacatttagtagctctaatgaagctttagcaattggtaatacttttgtaccaccgccaacgattgccaatgtcataggcacttcaattgtaccaatcaatcgttgacgatcttgatcgtaacgccatgtagcaataccacgatactgtccgtcacgactcgcgtatgcatgcgcacttgcttctgcaccacgcgtatcatttcctgttgctaaaacaacagcatgtatgccattcataacacctttattatgtgttgctgcacgatgaatatctacttgggccaatacagaagcacgttccattcgtttggcaacctcttctccagttctctcgccccttgctaaatctttaacatcaatttcgccttgaactttaacaacggacgctgttgcatgattggataaaatactcattaaaatgtcgctttgcggaaattcattttttaaaaatgcagttatggcctctaaaatcgtattaagcatattagcgcccatagcatctttcgtatcaacaaatacttttaaagatagtaactgttgctcaggaaatgtatcaatcgctatacgttggtaaccaccaccacgcgctttaatagaaggatatgcctcatccgcaattttatgaatttgcttttctaaagctttaatgtctgctgataatttttcagtatcgtcaacgccatcaaagacgatttgacctatcataatacgttcagaagataccgttttaaatccgccagtctgattcactagctttgcaccataactagctgcagcgacaactgaaggctcttccaccatcataggtacaacatatgccttatcgtccacaatgatattcggtaataatccaacgggtaatgcaccttgcgcgatgacattttcaattaaactattggctacttcttcatcgattaatggatgattcagtaaaatgtcgaattgttcttctgataaccattgcttatcaaccaattgttgtaacttttctttacgagataaatgtcgaaaattcttatctaaattttgcatggacgtactccttttacttcacataatttttaacatttcaatcactactatttttaccacaaaataacgtcattcgtcttaaaattcaattgaataattgtcgttttgactttaaaataaaacaaggtaaattaaaacgcttacaagaaacgacaaatcatttttaaatttagtatatttctttgtataaaattagcatattctgatatgatacaagtgttgcttttataaatttgaaaggatgtaaaaccttatgacaataggtatcgataaaataaacttttacgttccaaagtactatgtagacatggctaaattagcagaagcacgccaagtagacccaaacaaatttttaattggaattggtcaaactgaaatggctgttagtcctgtaaaccaagacatcgtttcaatgggcgctaacgctgctaaggacattataacagacgaagacaaaaagaaaattggtatggtaattgtggcaactgaatcagcagttgatgctgctaaagcagccgctgttcaaattcacaacttattaggtattcaaccttttgcacgctgctttgaaatgaaagaagcttgttatgctgcaacaccagcaattcaattagctaaagattatttagcaactagaccgaatgaaaaagtattagttattgctacagatacagcacgttatggattgaattcaggcggcgagccaacacaaggtgctggcgcagttgcgatggttattgcacataatccaagcattttggcattaaatgaagatgctgttgcttacactgaagacgtttatgatttctggcgtccaactggacataaatatccattagttgatggtgcattatctaaagatgcttatatccgctcattccaacaaagctggaatgaatacgcaaaacgtcaaggtaagtcgctagctgacttcgcatctctatgcttccatgttccatttacaaaaatgggtaaaaaggcattagagtcaatcattgataacgctgatgaaacaactcaagagcgtttacgttcaggatatgaagatgctgtagattataaccgttatgtcggtaatatttatactggatcattatatttaagcctaatatcattacttgaaaatcgagatttacaagctggtgaaacaatcggtttattcagttatggctcaggttcagttggtgaattttatagtgcgacattagttgaaggctacaaagatcatttagatcaagctgcacataaagcattattaaataaccgtactgaagtatctgttgatgcatatgaaacattcttcaaacgttttgatgacgttgaatttgacgaagaacaagatgctgttcatgaagatcgtcatattttctacttatcaaatattgaaaataacgttcgtgaatatcacagaccagagtagtcggtgtatttaaaacacatataataaaacctaaaagcagcagtaagaccacttctaattgaaatcgtcttactgctgttctctatttataacacttcgtattgaatgaattcattatgcctatttgacacattattgaagttttcctaatgcctggatcctttatacgttacggcttcgtgctatgttttggtacataaagctttgacatatcgatattctccaactctaacagcttaattttattattaatcgttccaccgaaccctgttaagctacccgttttaccgacaacacgatgacatggcacgataatagataatggattacttccgactgcacctccaaccgcttgggctgacatttttggcttgttaagcagcttgcctacttttttggcaatagcaccatacgttgttagagtcccataaggaacctgtcttaattcattccaaacacactgttgaaaatgactacctgttggctttaaaggtattgtgatttcaggattgtcacctttaaaatacgcgtctaaccactgtgtcgcctctctaaatatcgctaaagacgtattttcttccctagtaccatcaccttgttgattttcaaacaaaacagcggtcagacttaccccatcactcaaaagttccaatcgtcctacaggcgaatcatagtaactcttatactccataaaaatcccccctttttctaatcatacgccttaattgttaaattagaaaatattcatgttcacattttttaaaaataaataagtcgtcaattacgtatataaacacgtaataccagctatcactttgctgcaatatacagttacatatcttactacacgtgctaacctcttactttgtaaaccaaatcttaaattaaaatattgaaaatgcaatgaatccttaatattttattaaacctataattacttattaaaaataacacacaatattcataaagttttaaaaatattctgttttatcacctactattagtggaaaagtacaattgcaattgtatatagtttgcataacgcttcaaaagtaatttcttttttgtttagttcaaaaaaatttagaggtgatgttatatgaataacggttttttcaatagcgactttgattcaatttttcgaagaatgatgaaagatatgcaaggttcaaatcaagtcggaaacaaaaagtactatattaatggtaaagaagtttcacctgaagaactagcgcaactcacacaacaaggtggcaatcactctgctgaacaaagtgcgcaagcttttcaacaagcagcacaaagacaacaagggcaacaaggtggcaacggcaattatttagaacaaattggtcgtaaccttacgcaagaagcacgtgacggtttattagatccagtcattggtcgtgataaagaaattcaagaaactgctgaagttttaagtagacgaactaaaaacaatcctatattagttggagaagctggtgttggtaaaactgcgattgttgaaggtttagcacaggcaatcgttgaaggaaatgtaccagcagcaatcaaagacaaagaaattatttctgtagacatttcatcattagaagctggaacgcaatatcgtggtgcttttgaagaaaatattcaaaaattaatcgaaggtgttaaatcttcacaaaatgccgtactattctttgatgaaatccatcaaattatcggttcaggtgccacaggaagtgattcaggtagcaaagggttatctgatattttgaaacctgcattaagtcgtggtgagatttctattattggtgcaacaacacaagatgaatatcgaaacaatattcttaaagatgctgcattaacgcgcagatttaatgaagtgcttgttaatgaaccaagcgctaaagatactgttgaaattttaaaaggtattcgcgaaaaattcgaagaacaccatcaagtaaaattaccagatgacgtattaaaagcatgtgttgacttatcaattcaatatattccacaacgattattaccagataaagcaatcgatgtgttagatattacagcagcacatttatctgcgcaaagtccagctgtcgataaagttgaaactgaaaaacgaatttctgaattagaaaatgataaacgtaaagcagtaagtgctgaagaatataaaaaagctgacgacattcaaaatgaaatcaaatcattacaagataaattagaaaatagtaatggtgaacatactgctgttgctacagttcatgatatttcagatactattcaacgattaactggtattccagtttctcaaatggatgataacgatattgaacgtttaaaaaatatttctaatcgtttaagaagtaaaatcataggtcaagatcaagctgtagaaatggtttcacgtgcaattcgccgtaatcgtgctgggtttgatgacggcaaccgtccaattggcagtttcctatttgttggccctactggtgttggtaaaacagagcttgctaaacaattagcaattgatttatttggtaataaagatgcactgattcgacttgatatgagtgaatatagtgacacaacagctgtttcaaaaatgattggtacaactgctggttatgttggttatgatgacaattcaaatacgttaactgaaaaagtacgccgtaatccatactcagtcattctatttgatgaaatcgaaaaagcaaatccacaaattttaacattgttattacaagtaatggatgatggtaatttgactgatggtcaaggtaatgtcatcaactttaaaaatacaattattatttgtacatcaaatgctggctttggcaatggcaatgacgctgaagaaaaagatattatgcacgaaatgaaaaaattcttccgccctgaattccttaaccgcttcaacggcatcgttgaattcttacatttagataaagatgcattgcaagatatcgtcaacttattattagacgatgtacaagttacattagacaaaaaaggtattacgatggacgtttctcaagatgcgaaagattggttaattgaagaaggctatgatgaagaattaggtgcacgtccattaagacgtattgttgaacagcaagtacgtgacaaaattacagattactatttagatcatacagacgttaaacatgtggatatagatgttgaggataacgaattagtcgtaaaaggtaaataacgacactttaacatatcgcgcatcaaaaatgagcatcaggtcgcccttgcctgtgctcatttttttaattatttccctggaaaatgattcgctgtgtgctgttctgttccacaacaatcacgattaatgtcacatgtaccacattttccttgttttgaacgcttgaaaaattttactagtgtatataaggcatatccgaaaattgctaaaaaaattaaaatgttaataatgactgacactttaaccactccttaaacaaataaatgtccgacttgataaaaaatgaatgttaagacatatgcagtgactagaggataggcaactgcaagtgccgtccatttccatgaataagtctctttacggattgctgctactgtagaaacacaaggaatatacaatagtataaatatcataaatgcatacgcagatagcggtgtgaattgattttgaatcacattaacaaggcctgcatcacctgatgaatagataatcgccatcgaacttacgataacttcttttgctaaaaatcctggcactaacgtagcacctgcttgccatgttccaaatccgagcggttgcactaacataccaaagaaactaccaaccatatgtaaaaaactttgattgatattcacattgataccatgtggtcctacataacttaatagccaaatgactactgagccgccaaaaataaatgtacctgctttacgaacaaagcccttagccttttcccaagtactacgccacaacgttttaatggaaggcacacggtatgttggcaattccacaataaagattgcattatcattttttaaaatcgtcttagtaagtactgtactgactaaaaatgccataataatacctaaaacatacaggcttaatactactaaagattgattctctttgaaaaagatacctacgaacaacgcatacactggcagtctagcagagcatgacatgaatggtgcaattaatatcgttgttaaacgctctttttcattttcaatactgcgcgcagccataatactcggtacattacaaccaaatccgataatcattggtataaaagacttcccgcttaaaccgaacgattccataatacgatccattaaaaccgcaatacgtgccatataacccgaatcttctaataaagatataaagaaaaagagcacaacaatttgtggtacaaagactaatactgatcctacaccagcaataatgccatctgtaattaaatcttgtaaaaatggtataacaccaagataattcataatcgtcttcacactatctgtaaatgtaccacctataaatgcatcgagttgatccgacaaaggtgtgccaatccatgtaaatgtagtttgaaagatcaaccacataattgctagaaagataggcatccctatatatttatgtgttaatatcttgtctattctagagctgaaatattgcttatcttcatctggatacgttaccacgtcttgcaataacgtctcaatataatgattgcgtatacgctccatctctcgacgaacagatacagcccctacttgttcagcaacttgatcacgtaaactcgacaatttatttacaacctctgaattaagttcgtttgcaatttgcatgttatttaataagaattgaatcgcaataaacctagcttgatacttatcatgagatgtctctgtcattattatttgacacatatttttaattgtctcttcaatcttctcaccataattgattttaaaatgcggttgatacccttcccctagatgctttatttcgccaagtaaatattttgttcctttgcctgtacgtgccacaactggaaaaataggtgtttttaactttttcatcaatttatgataatcgatttttatcccgcgctttgtagctacatcaatcatatttaatccgatgtatattggttgattaagttctaacaattgtactgttaattgcatatttctttttagttgactcgcatcaacaatgttaatgattcctgaaaatgaatcgtttaataaatagtctgtcactacagtttcatctttagaaatcggcgataaatcatatgtacctggtaaatcaattaattgtcctacattttctttaagtttccctacttttttctctaccgttacgccactccagttgcctatatattcatacgaaccagttaaagcgttaaacaaagatgttttaccaacattaggatttcctaaaatacaataattttccattcgtccggctcctattcttctaatgcaatagaacaagcatcgcaatgtctaatacttaactgttgtccgtttacttcaataatacatggccctttaaataaacatttttgtttaatcgttatgatagcgtcatctgttaacccaaaggcacttagacgatacaacatattctcattagcaatatccattcgctttattttataagccttattcatttcaccatttttaatgtttaacatactatttcgctctcctattagaaataataatcattatcacttaaaaatcataacccttaaaattgtagctcgcaatactttatttaaataattttcatttttcatgtaaaatttgtgacattgcaaaaatgttttgtataatcacttccatgcaaaaaacctccgcttcaaatgtcattgatagacatttaaagcggaggcatgtacatgttattttatgatttatttcgtagatttttttctaacaattgattgagcttttcaatatttttattcaactgttctatattcgttgcttgttgttttgaatttagttgatgcttgttttgataatctattaaagcatcatataagaacaatgaacttgctgattgctgtttcacttcttggtacaatgccatcgttttatcatctagtactattgaatgtgcatcatcttgcccatgtgcatcttgatgtttcgatacatttgttgcaccttgtggatatactttaaaggttgtgtcgtatgtttccttactatctttagcttcagattcctgtgattcaaccgttttatatttttcgagtgcatgtccttcaatatcaactcgtggaataatgcgattcaaccatgctggtaaataccacgaaccttttccaaacaatttcgttaatgcaggaattaacatcattctgactacgaaggcatcaaagagtacaccaaacgctaatgccatacccattgatttaatcatgacatcttcttggaatacaaacgcaaagaagacactaaacataattaatgcagctgctacaataacaggaccgctttctttcaatcctactttgatagaataatcattatcccctgttttactatattcttcatgaattcgcgacataaggaagacttcataatccatcgctaatccaaataagatacctatagtaataaccggtaaaaatgctagcattggtcctgtcgtttcaataccaaacagacctttcataaaaccatcttgcattactaatgttgtaaatcctaatgttgccattaatgacaagacgaatcctaaaactgcttttaatggtattagaattgaacggaagacaatcattaataagaaaaatgctaatacaacaatgactgaggcaaataaaggtatcgcctcatttaactttttagacatatcaatattaatgacactttgtcccgaaatctccgttttgaacccatatttatcttgtgcatctttatgataatctcgtaaatcatgcactaaatcatttgtactctctgcattaggcccttgcttaggtatcacgaccatcaaagcgtaatcattatctttactcatttgtggtggcgtaacgatatctacatttttcttatctttaatatctttatatacagactgtaaatcttgttgtaatccttgtggatcatcctttttatctttcacatttatcaacatcggtatttggccattaaatccttcaccaaatttatccgagataatatcgtaagcttttttctgtgtagaatctgctggtttaacaccgtcatctggaataccaagtcgcatatgactaactggtattgcagctgctactaatatgattaaacctagtaatactgccgcaagtgcatttcctgtaataaatttagaccatggcgtatcaatatcttttttgaatttagactgtaatttattcactttaatgcgtttatggaaaatacttattaatgcaggtaataaagttaaagcgctaagtactgcaaaaacaacactaattgccgaagcaaatcccattaccgctaagaagtcaatgcctactaatgataaaccacatactgcaattacaactgttacaccagcaaaaacaactgcactacctgctgttcctattgcaagaccaatgcctttaatgtaatctgtttcagttttcataacttgtcgatatctgaataaaataaataatgcataatcgataccaactgctagtccaatcattacggctaatgtcagtgtgacatttggtatatcgaatgcataagttaacaaactgataatacctacaccagaggctagaccaatcaatgcacttataattggtaatcctgcagcaatgactgaaccgaatgtgattaacagtacaacaaatgcaacaataataccaactagttcagaattaccgcctacttctgtagatgtcattcctgtaccagttaactctgtttgtacattatgattgtcacgtaagtctttcaaatgacttttaacattatctctagagccatcttttaaagatgtttgactaacgtcatatgtgatatctgcaaatgcagttgttttatctttactaatttgcttattttcataaggatctgatattttatcaatgtgcttgtcatcttttttaatatcatctaacgttttcttaatatctttagtaatgttcggttgcacaataccatcatctttagtcgtcttaaagacaacacgtatttgtgccttttcactatcttgattaaaatgtttttcaatctttttattcgtatctaacgactctaatcctgtcattttaatatcattgtcaaatttcggtgcatttgtagcaagtggtatcaatattgcagctacaatcactatccatgcaatgaccgcggaccatttatgttttgcgatgaatgtccccatcttatataaaaattttgccaaagtatattgcctccttttaaaatcaacgttatagtttaaatatacagtgtagattattgttcgattatagtatctatccccgacctcttaaagaatcaattggaaaattttgtatattaaactacacacaaaggagaaatgtagatgaaagagactgatttacgagttataaagacaaaaaaagcattgtcgagtagcttgctacaattgttagaacagcaattattccaaacgattactgtcaatcaaatttgcgacaacgcactcgtacaccgtacaacattttataaacatttttatgataaatatgatcttctagagtacttgttcaatcaattgactaaagactactttgctagagatatcagtgaccgtcttaatcatccattccaaacgatgagtgatacgattaataataaagaggatttgagagaaatcgcagaattccaagaagaagacgctgaatttaataaagtattaaaaaatgtctgcattaaaattatgcataacgatatcaaaaataatagagaccgtatcgatattgacagcgacatcccagataatctcatattttatatttatgactcgttgattgaaggttttatacattggataaaagatgaaaaaattgattggcctggcgaagatattgataacattttccatagattaatcaatattaagattaaatagtagatgagaaactcatgagcgttaccaacattcataataaaaacgatagtgtacacgttaatgaattcgtgtactactatcgttttttatttttatcgtgcttatcgctattaaaacaactgatacacaacacataaactatgaagaaaaaaataaatccgctatctaaatgactttgactcagttgtttaaatgaccaaattgctaatacaattcccattattattgaaataacgtatctcacattcttatacctataatccttttctaaaaatatggttgctattacttaatttttaaagttataaataaaaagagccaaccgcaatggatggcccttgttcattatgaagcattagaacatttctgaaacaaccttttgttctaagaagtgtaataagtagtctggactacctgttttagcgtccgtacctgacattttgaaaccaccaaatggatggtatccaacaactgctgaagtacagcctctgttaaggtataaattgcctacatcaaattcgtttaccgctttaatccaatgctcgcgattatttgtaatcactgcaccagttaaaccgtaatctgtatcatttgcaacctcaattgcttcatcaaaatcgttaactttcacaaagccaacaactggaccaaaaatttcttcttgcatgattctatctttagatttaagtcctgaaatgattgttggttctacaaagtaaccttttgaatcatcagtgccgccaccttgttctaatttaccttcttctttaccaatctcaatataatttttaatcttatcaaattgttttttattaataactgggcccatatacgtattgtctacagtattgcccaacgttaattcttttgttaatttgattgatttctctaatacttcgtcataaacgtctttatgcacaattgcacgtgaacatgctgaacatttttgaccagaaaaaccaaatgctgacgttacaatagcttctgctgccatatctgtatcaatattttcatcaactacaatggcatctttaccacccatttcagcgataacacgtttcaagaagttttgaccttcttgaacaacggcactacgttcataaattctagtacctgtcgcacgtgatcctgtaaatgtaacgaaatgcgtatctttatgatcaactaagtaatcaccaatttctttcggatcaccaggaacaaagttaactacgccttttggtaatcctgcttcttctaaaatttccattaatttataagcgatataaggtgtatcctcagcaggtttcaataacactgtattacctgccacaactggtgctaaagttgtaccagccataatcgcaaacgggaagttccacggcggaattgtaacacctgtaccaattgatttatagaaatatttattgtgttcaccttcacgatcaagtactggcttaccttgagccaagtccatcattgaacgtgcatagtattcaataaaatcaataccttcagctgcatcaccaactgcttcatcccatggcttacctgcttcataaaccataattgctgcaatttccgcttttcgacgacgaataattgccgaaacacgtaacataagctctgcacgatcatttgctgaccatgttttccaagatttataagcttcgtttgctgctttaaacgcatcttcaacatcttgttttgttgcctttgatgcatttgcaatcacttgtgatgtgtctgcaggattgattgatttaattttgtcatctttgaaaatcttctctccattaatcactaatggtatgtcttgacctaattctttttccacgtctttcaatgctttcttaaacatatccacattttcttggactgaaaaatcgtaaccaggttcatttttaaattctactaccatgtacacttaccccctataaattttgaaagtggtttaaccctttgatttaatgatataacatcatttaaactcattttactatgattaaggttagttttgcaatcgctttcatttttatgttttatcacttattctcaagtattttgaaattgattggttactttttaaaatttatatgggtcgcaactgctactttatcgtttcgtcatttaatgtttcggatggtaggtcattatcaattttacgaacgactttacaagggtttccaaccgctaagctgtgtggcggaatatctttagtgacaacactaccagcaccaatcacactgccttctccaatcgtcacccctggtaacacggctacatgaccgccaaaccaagtattactgccaatatgaatgggtccggctttttcaaaaccttcatttctatgatggaaattaagtggatgtgtcgctgtgtagaatccacaattaggtcctataaaaacattatcgccaattgtaatctgtccaccatccataaagtaacaattggtgtttacatagacattttttcctagtttaacgttccaaccataatctgtatcaaaaggaatcgaaatacttacattgtctgttgttgtttgaaataattgatcaattaattcctttcttttatttgtagcactcggtcttgtatgatttaattcaaagcaaatatctttcgctcgtgcacgttcattgattaagtattgatcaaagtttgcatcgtaccatttttctgctaacattttttctttttcagtcattacacctttcaactcctaataacttatttacttgtttaaaagttaatcaaataaaccttcgcctatgcaactaatacgctataacattatgaaatcatgaccttatcacccttatctatacaattctcgcatcaaatactgctaaagtagtagataaattcaatactacagacgcattcattttttaatctattaacgtacaatgtgagtaagagaaatataaaggagtatgatagcgatgagaatattaattacaggcacagttgctatcttaatcattctaggtttggtcaaaacgatacaagattacgaaatgacaaacgacacgagtcgtcagttgtcagacaacaaagatgatgataaagtcatccatcttaataattttaaaaatttacatgcgaaagaatttaacccatctgatttcttttaagtcacctaagaattgcaaatccagaagtcatttaagttttacctttcattcatacatcctttaatattaattacgacttcttttatatagatgctaagtagagagattgttgtgcaatgtttgcacggcaatctctctttttctttttaaaattggtaaaagtaaaacgcaacgattgacttatatacctatagggggtacattagacgtgtaacaatgaatcacagggaggcaataatgtggctaatacgaaaaaaacaacattagatatcactggtatgacttgtgccgcatgttcaaatcgtatcgaaaagaaactgaataaacttgatgacgttaatgcccaagtgaatttaactacagagaaagcaactgttgagtataaccctgatcaacatgatgtccaagaatttattaatacgattcaacatttaggttacggtgtcgctgtagaaactgtcgaattagacattacaggtatgacttgtgctgcatgctcaagccgtattgaaaaagtgttaaataaaatggacggcgttcaaaatgcaacggtcaatttaacaacagagcaagctaaagttgactattatcctgaagaaacagatgctgataaacttgtcactcgcattcaaaaattaggttatgacgcgtctattaaagataacaataaagatcaaacgtcacgcaaagctgaagcgctacaacataaattgattaagcttatcatatcagcagtattatctttaccactattaatgttaatgtttgtacatcttttcaatatgcatataccagcactatttacgaatccatggttccaatttattttagctacacctgtacaatttattattggatggcaattttatgtaggtgcttataaaaacttaagaaatggtggcgccaatatggatgtacttgttgctgttggtacaagtgcagcatatttttacagtatttatgaaatggttcgttggctaaatggctcaacaacgcaaccgcatttatactttgaaacaagcgccgtactaattaccttaatcttattcggtaagtatttagaagctagagcgaagtctcaaacaaccaatgcgcttggcgaattattaagtttacaagctaaagaagcacgcattttaaaagatggtaatgaagtgatgattcctctaaatgaagtacatgttggagatacacttatcgttaaaccaggtgaaaagatacctgttgatggcaaaattattaaaggtatgactgccatcgacgaatctatgttaacaggtgaatctatccctgttgagaagaatgttgatgatactgtaattggttcaacgatgaacaaaaacggtactattactatgacagcaacaaaagttggcggggacactgcgttggcaaatattattaaagttgtcgaagaagctcaaagttctaaagcgccgattcaacgattggcagatattatttctggttatttcgttcctatcgttgttggtatcgcactattaacatttatcgtgtggattactttagttacaccaggtacatttgaacctgcacttgttgcgagtatttccgttctcgtcattgcttgtccatgcgcattgggacttgctacaccaacttctattatggtaggtactggtcgcgctgctgaaaatggtattttatttaaaggtggcgagtttgttgaacgcacacatcaaattgataccatcgttttagataagacgggtaccattacaaatggtcgtccagtcgtgacagattatcatggtgacaatcaaacgctacaactacttgctactgctgaaaaagattctgaacacccattggcagaagccattgtcaattatgcaaaagaaaagcaattaatattaactgagacaacaacatttaaagcagtacctggccatggtattgaagcaacgattgatcatcaccatatattggttggtaaccgtaaattaatggctgacaatgatattagcttgcctaagcatatttctgatgatttaacacattatgaacgagatggtaaaactgctatgctcattgctgttaattattcattaactggtatcatcgcagtggcagatactgtcaaagatcatgccaaagatgctataaaacaattgcatgatatgggcattgaagttgccatgttaactggcgataataaaaacactgctcaagccattgcaaaacaagtaggcatagatactgttattgcagatattttaccagaagaaaaagctgcacaaattgcgaaactacagcaacaaggtaagaaggttgcgatggttggtgacggtgtaaatgatgcacctgcattagttaaagctgatatcggtatcgccattggtacaggtacagaagttgccattgaagcagctgatattactattcttggtggcgacttgatgcttattcctaaagccatttatgcaagtaaagcaaccattcgtaatattcgtcaaaatctattttgggcattcggctataatattgccggtatccctatagctgcattgggcttacttgcgccatgggttgctggtgctgcaatggcactaagttcagtaagtgttgtcacaaacgcacttagattgaaaaagatgcgattagaaccacgccgtaaagatgcctagattccttaataatgaaggattcgttggtgattctgagataggctagtgattggctctataatgtcgcggtttacagttggatcttcgctccaactgcatatatagttacacttttcgcttggcgaattagtgtatcttacctaatagctccgcctattaggttccatcattattataaataataagtacactacggtttacagttggatcttcgctccaactgcataagagccactaattattataaataataagtacactacggtttacagttggatcttcgctccaactgcataagagccactaattattataaataataagtacactacggtttacagttggatcttcgctccaactgcataagagccactaattattataaataataagtacactacggtttacagttggatcttcgctccaactgcataagagccactaattattataaataataagtggctctaaaaggaggtgaatgctatgtcacaagaaattttaaatgttgaaggtatgagctgtggtcactgcaaaagtgctgttgaatctgcattaaataatattgacggtgtcacttcagctgacgttaaccttgaaaatggtcaagtaagtgttcaatatgatgacagtaaagttgctgtatctcaaatgaaagacgcaattgaagatcaaggttacgatgtcgtttaattaggcaatattcaacgtcatcaacaccaaattaaaaaatcgaactgatgagaatcccaacaatccaaattatctcatcagttcgatttttaatttactcgtaacctagtatctccagtctgcaatacatctaatgttgcatctaatgcatcgacaattagatttttaactgcagcttcagtataaaacgcaatatgtggtgttaatatgacatcttccctgtcaatcaacgattctaacaatggatcgttcagtgttttgcccctttgatcacttgggaaaagtttgcgttcaaattcatacgtatcaagtgctgcacctttaatcacaccattgtctaatgcgtctaataacgccttagtatctactaaagaacctctcgcacaattgacaaatactgcgccctttttaaaatgtttaaataattcagcattaaatagataatgattatatttcgttgcaggtacatgtaatgtcacgatatcagcaccttcaaccgcttcctcaatcgtatctttgtaatcgacatacgttgcaattttagcattaggaaacgggtcgtatgcgaccacatcactttgataaccattggcaaatatatcggctactacacggccaattcgacctgtaccaataacagctacttttaaatctttaatggatttcgataaaatagtaggttcccatctaaaatcatgctcccgcactttcgtttgaatttgattaaaatgacgaaccacattaatagcctggttcacagcaaactccgcaattgaattcggagagtatgacggcacatttgacacaataaagttatacttgtttgctaactccaaatcatatgtatcaaatccagcactacgttgtgcgatttgtttaatacctagttcatttaatcgtttataaacatgctctgataatggtatttgttgtgatagcgataagccatcataaccagcgacaccttcaacattgtcatcagttaatgcttctttagtaatatctacctcaacatgatgtttctctgcccacgccttgatataaggcatatcttcatcacgtacactcatgattttaatttttgtcattttaacatcacccttaactttattattcatataaatatgctagttctgttaatcttattgcagcttcgtctaatttctggtcatctaacgccaatgaaattctcacataacgattaccattctctccaaatggtttccctggagcaacaagtattgacttctcttgcactaaaaattgctcaaattgctcgctgtcataaccaggcggtgtttccaaccatacatatatgccacctttagcatgaacaaatggcaaatcagcttttgcaagcatggcttcgaatcggtcacgacgtgttttaaatacattgctttgttcttctaaaaaatcatcataatgattcaaagcatatattgcggcatcttgtaatgcaccaaacatcccagcatttgtgtgcgtttggtactttttcaaagcttgaatcatatctttattaccaactgcaaaaccgactctaaaacctgacatgttataacctttagacaaggaataaatttcaatcgcaacatctttcccattttccgaagcaagtatactaggatttttagcgtcgaaaccgaaagcaccataagcaaaatcatgcacgattttagtgtctgtacctttaaatttagctatcgcttcatcaaaaacttctttcgtagctgtcgatccagttggattatttggatacgttaaataaatgagttttgttttatctattatttgtgaatcaactttggaccaatctggcaaataatgtggcggttctaaattaagcgggactggcttgccatcagctaaaagtacacctgctaaataatccgtgtagcctggatcaggtagtaatacatagtctcctggattgataacacatgttggtactgccactaatccattttttgtaccatataaaatgcatacttcatcttctttatctaacgtcacattatattgtctttgataaaaatctacaatagcttgcttgaacgcttctttaccatgaaaagcaccatatttttgattttcaggaatagttagtgctttttgaaaatgatcaataataccttgtggcgtgggcccatcagggattccaactgccatattaattaatggcaatggtccatgttcgattttacgtcccatcgttttcccgaaataactatcagggatatttgctaatttgttagagatcatcaaattcctcctctatcattaaacatagcctgggcgactatcataatcctaacaacttgtatcactctcatttagatggttacaatgacatcgccattcaccgttatgttcaacagaacttatgacacacgttgtattgaatgaatttattttcattttaggtaggtataatattattgtcaatattaggaattttcagattaatatgcactcaatcgttatgatttaactgtcatgcatatccgcatgcgcaaccagttagatatgcttatataaagtataacgcccatcaaggtacgtattcaaacgtgaaccttaacaggcgtcattcattgttaaataaaacttcttaagcacatacttatttcactatgccttttacgttccccttatacttttctcacatctttctcttagactactcccttatacgccccgctcaatatctttaatcatttcatctacagttattttcgcactcgttaagacaataggaacgcctgcacctggatgcgtacttgcacctgcaaaatataaatctttataatctcgcgatacattttgtggacgataataattactttgcgctaaagttggcattaaaccgaatgccgaaccaaatttcgcatgatacgtttgctcaaaatcatttggcgtaaagattgtttctgaaacaatatgcgattttatatcttcaaatacttcaatcgttgctaatttacgataaataatttcctttatttgttgcgtcaaagcttcatctgaccaatcgattccgctacctgttttaagttccggcgtcggcattagcacataaataccagttttgccttctggcgcaagtgatttatcagcgaccgctggtacatacacataaatagaaggatcatatgataaacgtccctcaaatatttcttcaatattgcctctaaagtcatctgaaaaaataacattatgaagtctcacttgatctgtcacatcaatatctataccgatatacattaaaaatgctgaacaagagtaatctaagtctgcaattttatgtggtggatactttttaataggtgcaaaatctggcattaatgattccgcaacactagggaaatcagccgtacataaaattttatcaaattttcttatgtcaccattcacttttatcgcatcggcccgtttgaatttaggatcaataataatttgctcaatttcagcatttagttcaatattaacgcctaagtctttatttaattgcgctagcccttgagccatgccatacataccgcctttaataaaatgcacaccaaacatcatttcaatcataggaataattgaatatagtgacgggcctcgttttggatcaattcctatgtataacgtttgaaacgctaaaagcttttgtatcttttcgttatcaatataatgttcaattagctgatctgcatgatttaacgtttttaacttagcaccttgcacaagtgacgtcatattataaaagtcactcggtttgcgatacgttctttctaagaaatagcgacgtgcaatttcatattttttataaacatccgttaaaaaggacataaaaccatgcgttgaaccaggttctatactttctagcatttgctgtaattcagctaaatctgtaggcaccgttatacgatcatcgtggtcaaaatacacatcgtaaatataacgtaattgtctcaattcaatataatcttcataatttttaccacacgctgtaaaaacatctttataaacatctggcatcatgacaattgtgggacccatatcaaatgtaaagccgtctttctttaattgattcatacgcccgcctacattattatttttttcaaatatcgtcacttcatgaccttgagaagcaatacgggctgccgctgctaatcctgtgacacctgcaccaattactgcaatcttcattattcaaccacctatattctatgatatttactatttatttcatgaaacaactttgcctttttcctcttatccacaaaaacacgttcatgtaatgtatagttagcctgtctcacttcgtccagtatttcaatatatatacgtgctgctaattctatgattggttgtgcttcaatactaaatactttgatttgatccataacatcttgaaaatctttttctgcgatagctgcataatattcccataagtcaatataatgattattaacaccattttggtacacttcagcaatatcaacttcatattgctttaatcgttgcttactaaaatatatccgttcattgtcaaaatcttcaccgacatctcttaatatattaatcaattgcaacgattcaccaagtcttcttgcgacatcgtatgtctgatgtgtttcatgatcacttaaaatcggcgtcaatacttcacctactgtaccagcaacaccataacaatatccgaataattcagcgtccgtttcaaacattgtaaaatgttgatctttatatacagtatcaatgagattataaaaagattgaaaggcgatatttttatgttgtgcaacatgctgaagcgccatcatgattctacgatcactttgaaagtgatgatgttcatatgggtatttttcaatagattgtatatcttcttttatttgatttaaaaattgaatatcgccataaacatctatactgtcatcaattttacgacacacagcataaattgcccaaaccgcttttctttgatcttctggtaacaagtcaaaagcgtaagaaaagctttttgaatgtttcttcatgattttatgacaatatttaaaattcatatccatcattgtcatactagtcctcctatattgaaatgccattaccttgatttattgttctttagatatagaatattgacgacctttccattcaactacaccataacgatgcgtttgtttccaagattggatgaaaattttagtaaaaaacataaataacaatggatgacataccattaataaattagaaaattggccgacccttcgatgcagataaataaattgtgtagtatagctcaagtaaagtgctaccatttttcttacagacatttggcgatattttaaactaagacatagccctaaaatactcgctatagaaccaaacaaccacaacacaattgctgtcatgatcttaggctttgtgccacctgccccagttgacaaatgctttgtccatccttcttgtaatgactgaaatccttcttgatacatgcgaaatgcaacaaatggaaacccttcataaactgttacgggcaatgattgtgaagtatatgcacttcctaaagcaaatccttcaataatatgacggtttgcacttttatgacctccagttgcataataatcttctttatttgttaatgtcaccggtccaaatgcatgctggttagtccgaccgtcgtctaaggtagaaaatacattcataccaacgactgtcattaaattaaatatcgctgaaaacccttcgtagaaacgctttgttatatgataaggctgtacgcttaacaatcctttttcaccttgtaattgatactgattaatcaacgtttcaacagcatctttccttaagaaagttacatcagcatctacaaaggcaatgcgattcgtacatgcatgcgtcacaccttgataacaagcatgtgatttcccataccatttgccgtcagtatcatcaacaacatctactacagtcgcaccatatgaacgtgctacacgtgctgtttcatctgtcgatccgtcattcataacaatgacatctactggaacttgctgttgtattatcgaatgtagtaaatgacctattcttttttcttcgtttctagccggaataataattgttaatgctttatgattgaagttcagcgttttcgcctttagctgatgtctacgattaaatatcaatgcaccacacgccatagacatggtcactattactgttaatattcgtgataaccatttcatagatatcacttcctattcttcgcttctcgcgcgtttattttgtctgcgacttgttgcccacttaatgtaaccattggcatgccaccaccaggatttactgatccacctacaaagtacaagttttcaaaatactgactttctttaggaaatttaaatcctttgtttttctttttatctgctacaacaccatatattgcaccacgattagaacgataatttttttcaatatcctccggtgtccaaacatcttcataaataatgtgttttcttaaatcagtaagtcccattttttctaatttatccaaaattttatccctaaacttcgcataatcttcagtggtaaaaggctgatcttgaatatatggaatatgtggtaagactttgatattttcataacctactggcgcttgtgtgtgatcagttttattcgtatttactagataaatggtcggatcatctggcaataccttttcatgaaaaacttgttgataattgagataagcattttccgtaaaaaagaaattatgatgtgctaattgcgggtattggcaagcaacacctaaatgcatcacatatcctgagcttgccggctcaaattccctctctaatttgtttaatcgttgagtatcaaggtgaattaaatatttataagtaggtatgacttccatatttgaaataatataatctgcctttacaaactcacctgtatctaatctgacacccgtcacacgtctttgatatgttttaatattgtccacacgtgcacctgtatgaattgtgacaccttcttcacgcgctagcttttccaaggcattggctaaatgatggattccaccttctacataccaaaggccttgctcttgttgcatatggaataacatagataatacagctggcgcatcgtatgatgaagaacctacatatttgataaaatagcctaacatttgtcgcaagtatggattcgagatacgcttgtctatggcctgttgcatagtatgtacataatcataattaataagagcatttaatggcccatgaaatttaataatttgagatagtgtatctaaaccatagttgaaataccctttttcagtaatacgatcgattcgtcttgtataattcaaataattttgcagttcctctatatcctgtttcgacaatatcgcattatgctgacctgtttctttaataccttcatacaaatcgatagtcgttccatctggaaaaaagctacgccattgatgtggcaatcgcttgattgtaacgtagtctgacatttgcttcttgctatattcgaataatttttcaaaaatataaggcatcgttaaaatagatggacctaaatcaaagccaaagccatctgattcatgacgattcactttgcctcctatatgattattttgttcatataatgagaccgaatagccactttgtgccattcgaattgctgcagaaatcccacctaagccaccaccaataacgatgatatgtttagtcatgacgttcacctcttcgttttaatatgcgtagtaactgcgttaatctcggtcgattatagcgttgcacaataatgattggaacattagctatcattgcatagaaaatatttatatactttactaaacgagggcctttattgaatatgatgactggaagtatcgatatccaatgaatcaactctgccctctttgtctctataatcattttttcaatttcatcagtattgattgtcattaaatgacgctgatcatatatattttgattaagctgatgaccatctaaaatcttatgtttccattttcttacgtaaaaccatttgttccaaaattttccatgcttctcaaagttaaatgatttaaatattatgtacttctgacgaaaatacttatcaggaattcttgtacctaaatttgctatatttagttgaacaattaaccaatacatactacaaaaaaatgctgttttaatatattttttcatggttttcatctaaattgaatcactctcaatcatactgacatagtataaattatcactttattacttagttccctaaagatcagtgaataaaccgctctcatttatatttatataaaacaaaaacgccaatactctcatgttagagaatattgacgtcatttgatttacatttgattaatgaatgaaattatatgaacctgcttggtttgctgaaattgtacgagacgtaaccacaccagcaccatgtccatagttcatttctgaaacacgaacagaaccgttgctgttaacgccttcaacgtaagcaacatgaccgtaatagccttgtgttgtttgcatgatagcaccaacttttggtgtattgttcactgtatagccagatgatgcagctgcgttagcccaattacttgcgttaccccatgttgaaccaattttcccaccaacacgatcaaatacataataagtacattgtcctgaagtatataagttacttcctgatgcataaccattagaaattgaacgaccatttgaagatggcgctgcagttgtagtcacatgaacattattacttgttgtgctataacttgcacctgaaccaccagtataatagttatttgttgctgtttgactattgtttgtatagttattgtattgatatgaatgattatagtagttattgtaagatgcattgttataactataagtattgtagttgttgtagtagtatgtgttgttttgcgttaattgacttggattccaatttcctgtccaagtgtaatgataattaccttgtgcatcaattgtatacgtatagctgtatgattgagcgtcattagaattatatccattgttattttgttctgcggcttgtgcatcatgtcctgcaaatgcgatagtggcaagtcctgctgtagcgattgtagctgtaacgatttttttcataattaaatatcctcccaataatcaaaacactctatacatatagtcattagcgactcaattattttaaattttatattttttatttttttagtatgcaaacaattataacttttatagttttgcgacaaaacaaactataacagagattaggtgtcttgcgggctttgttatcataatgtaatctgttcctaataaagcttcattgaatgtaatataccaattagaatgtttacaacactttttctgcaccgttactatgggatttgaaaataaaaaagcactaaacttttaatgaaatacatcatttttgataataaatatcagaagtaatgtaatatttcaaaagtttagtgcatcaaattatttcttatttgtagcatgtgtttccatcgtttttacaatcaaatcagtcagcgctttactacctgcatattctaagtgaataccgtcatatgcaaagtattccggatgacctgcagaagctttataccaatcgactagatgtacattagagcgcttttcagctgcctcataaattaatttatttattctaccttcataatctctaggtactctaatagaaactaaatatatgtctgcttttccaaaactatccaatagttcatttaattgatctttcgtaaatgccccatttgtaccaagctctactacaactttttgaccttttttagcatagtctttatattgcgatttcacaattggtgtagcatcaacgagttgccgtccaactttaccatcaatttgtgcatttggtattttcttagtaaagacattaccaatatccaccatgaccgagtcaccaattaatagtggtgatgactttttaatatcctctttgctattcgctgtctgcttatcctcttgcttatcttttttaacgacttttttcttcgttgttttaaattccgtcttcttctctttcttctcggcttcatgttgtttgccaagtgcatcaaactgtccactgagcacaacgatagacggaaccaataataggataactaacactgttctagcaaattgccccttctttttaggtaaaaatgcaaaagctttaaatccttttttacgtataggtgtttcaataaagcgatacgaaatttcagccattaacgctgttaacaaaatttctataatataaacgtataccggtatttgtccttgtacgtaataactgttcacaaaaacaatgataggataatgccataagtataagctatatgatcgtttacctataattagcaaaggtttcatacttaaaaatttagcaaataaactagaaggatgtaccgcaattgcaataatgaataaagttgcaaatgatataatgtaaaatcctccattatagatccattgatcttggtctccaactataaagaacaaagtcattagaaccgcaaaaccagatatccctataatatctaatgatacgacaatctttttagaaatatcttttttcaaagcaaacggaggccatataaatgctaatatacaaccaagcaataaagtttgcagtcgtgtatctgtcccaaaatacacacgtgaattatctccagtgatgaaatgaatcactatcataagtcctaaagaaatcaacgatacaataaatagcgtttgaataatatttctcggtttaaatctatgtaataagaacgtgataaccaatgggaaaagcaagtaaaattgttcttcaatggctaaagaccataaatgtttgagtggttcaatagcaaattggttaaaataatctacattctgtgaaatgtaccaccagtttgaaacatagaatatagctgcaatagcatctcgtttcatttgtataatcaattccggtttaaatatcagtgtgaacgtaagcacgacacagattaaaaataacactgccggaatgagtcgtttcaatcgtcgcttccaaaactctagcaaatcgattttttgcgtccgataatactcacttatcaacaaacttgttattaaataacctgaaataacgaagaatgtatctactcctaaaaagcccccacttaaccattgtgcattcaagtgataaataatgattcctataactgcgaatgccctcaatccatctaatccaggtaagtatcgcggggaatacattttttctaaacgtttaaagtcttttgtatccatgttaataaacgccccatttatttttctctattttgtagcatatcacaatatttttgaaaataaaatattgcactgattttcattaattgatttaacccttaattaagatagttttaaattttttattaagtagaaaacaattattacagttgatttcattactgcaaaccacatataaatttgtcgattttactacataacatagattatcatagattcttgaatttttagcaaaataactgttattttcattatatttttacaaaaaaaggttcgttttatattttatgcatcttactgtaacagaatcattaagatatgctattcgaatatactttttcaaaatttatataatgaataaattaacatgtattgaaaaaaaagcgaaatgcagcctatcctctaatgtaaaccaaacgatatatctcgtcagactttatatttaaacgctatgtgtcacttttaaaatgaatattactaagattgtcatatcaattattattgcatcgaattaatcttttaaatttctgtaataaaacctattatctacatctaatttaggaaaactacttggtaaatctcctcgcttaatttcacggaagccattattagaataaaaatactgtgcactaataaatttatcaattgttcctaaataaataccatcgatattttgttctttacatgtcattataactttatctaaaagttttttacctatttttaaattcctataacctttatcaacaaacatttttttaagtgcagacatattattatctagtctaatcaaacctatagtaccaacaatattttgatgattgtttattgcaagccaaaattgccctccattattcaaatagttatgttcgatgttctccaaatcaggttgatcatctctatcaatttttatattaaattcatttttttgaatcgataaaataaactcgattagctcttccttataagacctattatattcaattatgtttatagccatttttatctcctttttcatttaatttaattataaaatgtgcgtttagtttgtatctagtgtactcagtacagcctcaaatgaagtttcattccacttggcacttaataaagacaagtattttagcagtaatacaataaagtccaataaatttccctaacttcaatatccactttttaaaaaatgtatttttaattaataaaaaaactctccccaatttctatgggaagagctatatatttaatgtctaaacattacttttatttattatgaaggaattagaatccccaagcacctaaaccttgtgctttgtatgctttaacagctgcgttgatttgttggtcaacagtgtttgttggaccccaacctggcatagtttggaataaacctgaagcacctgatgggttgtaagcatttacttgaccatttgattcacgagcgatgattgcagcccatgtagaagctgaaacaccagtacgttgagccatgatttgagctgctgatgaaccagtagcacctgcagtattaccattgcttaatctcactgaacttgaagtagttgaagtgctgtagttatggtaagttggagctgaaacagcttcaacgtttgagttacttgattgtgcattgtagcttactgattgtacatttgaaccttggttgtatgaagtagtgtagtctgcacctgcaacgtttgagaaaccagcagtttgaccattagctgcttcatagctccatgaccatgtagtaccatttgaagtgaagttatattggaaaccatcttttacaaagtggatgtcatatgcaccatctttgattggagctgcatttaattgatcttggtgattatgcgctaagtcaactaagtgtgcttgatcaacgtttacttcagcagcgtgtgcttgatgtcctgtacctgctgcgtaacctgttacacctaatgccactgctaatgatgatgccataattgtctttttcatagtaaaaaatcctccagtaataattgtaagtttatgtttttagtaattatattttgaatttgaatgtcgtagtgcaagtttaaattgtcttttatttctttcaacggtactcactatatcacaaaaaaccagccagtaaattacactttctttacaaaacattacaatatcaagtgttatttgtaatgttgaaatatggctattttatactgtaatgtgaaatatgtgccctttagaatccaatcaacccttgaaatagtctttaacacataagatttttactatatttagctcaactattacagctttcgtaatattacagattgtatttttgttacatagctgtaatatatctgacatgtaacttctcttattttcgtacattaaacgcaattaaaaagcaatcaacaaatatgtttctacacatgtattgattgctattattgttgtatattcaaagttttaaaacacacatcttttgtgaattgtcttatcttttattagcgcaaataaactgcagctcaattatattgttcaacttcattctcgcaattcacaataacattaaataatttttggtctcatattttcaaaaaacatactgttattatcccatgaatttaaaaatatcattagtatataaacgaaacactttacgataaatgatatctgcaagccaagctgttacaaatggtacaacaaagaacgctactacaattagtaagacactcaaccaagcagaatcaacctccataaatttaaatgcattaatcggtcctaccattcctataaaaccaaatccagctgactctttcgttccatgaatacctactaatgctgataccaaacctgatacaatggctgtcgttaatattggtaacataagaattggatatttcaccatattaggtatcatcattttaacgcctccaaagaagacggataacggcacccctaaacgattcactttacttgtaccaattatcaatactgcttcagtcgcggagataccaattgacgctgatccagctgctaaacctgtaatacctatcgcaaaggcaatggccacagttgatagtggcgaaataataataagactaaataccattgaaatcaaaatactcatgacaatcggttgtaattctgtaaaaccattaaccatattaccgatggctgttgtaatcattttcgtatacggcaatattaaaacaccaattgcacctgaaataccgccaacaactgttgggaatacaatcaatgccatactacctacgcgatgttgaataagtaaaatgaataacactgcaatcgctgctgtaatcattgtattaattaaatcaccaatacccgtaatcatccaagcaccatttttaaactgcgctgcaccgcttcctacatatgctgcacttgccacaacagcaattgctaatggcgataggtcaaatttcatggcaaccaatgcaccaatcaaagcaggtactgtaaattgaattgcaacgacaacgcctaataacgttttaaaaatcggatgataatccataaagtatttaaaaatttctccaagtatcgcattaggaactaaacccgcaacaatacctatggcgacacctgataaaactctaaatataaaatctttgggtgtaattgttttaattgatgtcataatatcatccttccatttatgtatatacatctgtatgcaaataataaagagccttaagttataagctgccactagcttaaattctaagatgtgcatgccgatgttgttatatttaggctagcagtatcatctataactcaagactatgaaaaatagtatatcacaaaattctgaatttttagataaagaaattggcaatttttcaaacatattgttacaatacacttttattttatcttcatttttaaaatccattaatacaatagaagaaagacattcaaatgcttaccaaaaaggtacattatttgttaggagcgtatcagcacttacatatcatcaacacaattgacaatataatagaagatactgataataagtgttaaaacaacagatgttaggtagtgaacaaatgatggaaagtaaatccatagatccaagaatcgttagaaccaaacaattgcttgtcgatgcttttcttaaaatttctagagaaaagaaattatctcaaattacagttaaagatatcactgatattgctacgctaaatcgtgcaacattttacgctcatttcactgataaagaagacctcctagactacacattatctgtaaccattttaaaagacttgaatgataatttgagcatttctaatgtcattaatgaaaaggttctgcgtaatattttcatttcaattgcgagttatatcaaagatgctgcaaagtcttgcgaattaaatagtgaagcattttgcaacaaagcacatcaacgtattaataatgaattagaagatatttttgcgattatgttagaaaacagctatccggagcatcaacgagatatcattgtaaatagtgcgagttttttagcagctggtatctcaggcttagcattacattggtttaacacgagtcaagagacagccgatgtgtttatcgatcgcaaccttccatttttaattcatcatatagcacatttttaataaaacttggtatttagtcatgcatcttgaaatcactatgtgacttaggttcatacttgtacacacaataaaatttaacgtattacgattgattagccgtgtctaggacataaatcaacgtcctatactctacaatgtcatattagcagtcgttaactgaatgaaaataagcttgtcattaaaacatatagattttagtgacaagcatttttgtttttgcgtacttaaacaacacttcaggcaatatgttgtttaggcaacaaatgatatgtgcgtgtttattggcaaacgtacgacatagtagtatagtatgtctaaacaacatatgttgcatagttgatatgcgttgtttaaatactaagataggagggattgacgtgagcgagacagatgaacctcaggggtttgaacgcacgcataatatattaaatattaatcagagtagtctgggtgtagtgacatacattacaaataaattaaagtcgacgttgaagcaacacataataattgctcgtggtaaaaagcgaatcgactatcgactgtcgtataacttttacactacgtattatgataatgtagaaatcaagaaaatcgactgtgaatatacctatgctatgcccattgcaattttaataagacacacgatgtcattcgacaatgctcatttctttgctcagttacgtcatcctgtcttataaaacaacattgcagacatgtatatcaaacgacacttcaataacatcactttgccatcgtactactagtaaaatcgtgtctcaaatcccttattttaattccaaaaatctgctggtcaaaagaccgagaaactaaaaacattacttaatgtgttgataaattaccatataaaaataatctcaaaatatatcaacacttgattctaaggaggatatgacaatatgaaaattttagatagaattaatgaacttgcaaataaagaaaaagtacaaccacttactgtagctgaaaaacaagaacaacatgcattgcgtcaagactacttaagcatgatccgaggacaagtattaacaacattttccacaataaaagtggttgatccaatcggtcaggatgtcacaccagataaagtttatgatcttcgccaacaatacggttatattcaaaattaatatttgctcacgaggtattgcacttaaggtgccaactgacctcataaacaaagcccatactgattgaagacactaatgtgtcgcaccatggtgcacattacgcttcatctctgtatgggctttttatttattcttttgagaatttcattttagcagaccaaaaaattaaaatggtgtccatcaagatctttgaacattgctccataaaacccttggcttactgttggttcttgaacgactgtgccacccgcttctttcactttattcaccaactggtcaacttcttcatttgtgttcacacctagagaaatcatcacttcatttggttcagtattaaggctttgctgacttacattttgaaaatgcttgttttctattaaaattacggttgtttgacctatttgaatgccgaccattttatctaacatttgtgggtttctatttattttaaatcctaacgctttataaaactgtgcgctcttttctaaatcttgcacatgcaaattaaaccacattgattgaatcatgattgcaccccattcattacttattatagttttggactttaagccaatcacttaatgataatcttgttggatttatttcagccattaattcaaagtctacttcataacctttttcttccaaccattgcttttctgcaacaccactaacaaattctccttctataacagtagatttacctgtcacttcactaaaaattgttgctgcttcacttaatgtaacttcatcggaaccaatctctattgattgatgcgtaaagctttgtggatgtgcaaaaatatacgatgcaattttagctatatcaatagaagaaatcattgtgaattttatattcggattaataaattctggtaatgtaatacgttcatcttcgactttagcaatgcgtaaaaaattatccataaagaatgatggtttgataactgttgcatttatattagattccattaatctattttctatttttgctagtacttcaaagtgtgggccagttcgatttcgattaacccctcccgcagtactatacacaatatgttgaatattttcttgctcagctatttcaattatcttcataccttgtcttaattcttcgctaacatcatctttaacgattggctgaatactgtataagccatacttacctttcatcgctgattgcaaactaacattatcactcagatcaccttcaacgattgataaatgcggatgtcctatgtctgaaagtttacgattattcttatttctagttaatgcacttacatatcatccatcctctaacaactgttttacaactgcattaccttgcttccctgttgcgcctattactaaaatatctttcattttagatccactcctctttttatcttaaaaaccaatagtcctctttttcaccttttaaatacgtatatggttctggtgtttgtccatttcctttaatattgtcgtttattacatctctgacatcccatactaaatgaataaatcgttgtaattgatgactaaaaatgcctagtggcgctgtcatagctaatactttttccacatcttctgtagtgacattcagtttttcagcaatcatttgaaccgataaggtagatgcttcgaaatgtgcttgcaactcttcagctgtgatgcgtctttgctctttatttaaagacattatcaacactcttttcttttatgatatttaatagttattgcaaattcattgctaactttcttaacacgttttataataaacggagagttatccgtttgtcaattttagagaattttaagtaggtgtaatcatgcgaaaagatgcaaaagagaataggcaacgaattgaagaaatagcgcacaaactttttgatgaagaaggcgttgaaaacattagtatgaatcgtattgctaaagaactaggtatcggtatagggacattgtatcgacatttcaaagataaaagcgatttatgctactacgtcatacaaagagaccttgatatttttatcactcattttaagcaaattaaagatgactatcattctaattatgaggttatgcaagtgtcgttagattatcttttacaatttaaaatcgataataaggcactactgcaatgtattgaagcaggcaacaataaattacgtttttaccaaagcgcattttatcaagaattatttgatttttattatgacttatttaaaagcgatgacgacacttacacgaagttcaaaacagatatgctgttgcaatcattatcaactagtgtatttgccttccaaatagagcatcgccatatttcaattgaagcgtacagaaattatttattaaacatttatttagatgaggtgggacgtaatgactaaaattgtgttaatcacaggaggcaataaagggttaggctatgcaagtgcagaggcacttaaagcattgggttacaaagtttatataggttctcggaatgatgtaagaggacaacaagcatcacaaaaattaggtgttcattatgtacaattagatgttacaagtgactactcagtcaaaaatgcttataacatgattgctgaaaaagaaggccgtcttgatatcctcattaacaatgcaggtatatctggtcaattttcagcaccttccaaattgacacctcgtgacgttgaagaagtatatcaaacgaatgtattcggtatcgtacgaatgatgaatacattcgtccctctcttagaaaaatctgaacaacctgttgtcgtcaacgtatcaagtggtttaggttcatttggaatggttacaaaccccgaaacagctgaatctaaagtgaattcattagcttattgttcgtctaaatcggcagtaacaatgctaacgctacaatacgctaaaggattacctaacatgcaaatcaatgctgctgatccaggcgctacaaatactgatttagttggtgattttagtaataattccaaacacgtttctgaaggaatcaagccaatcattcaattagcaacgattggtgcagatggcccaacaggtacatttattaatggcgatggagagatgccttggtagatcaattttatgttacaaacattgaaattagaggtatataaaaaatgcttctgcaatagatgcaataaacatgcaatacaatatggaggcgaagtaaatgaaaagtattacgtttgaagaacattatgtcattgaagatattcaaaaagaaacgatgaatgcgatatcagcagatcctaaaggtgtaccgatgaaagtaatgttagaaggccttgaaaaaaagacaggttttacaaatgccgacgaattatcacatcatgatgaacgtatccaatttatgaataatcaagacgttcaaattcaagtcttatcttatggaaatggttctccttcaaatttggttggtcagaaagccattgaattatgtcaaaaagcaaatgatcaattggcaaactatattgcacaatatcccaatcgctttgtaggctttgcaactttacctatcaatgagcctgaagccgcagcgcgagaattcgaacgttgcatcaatgatttaggattcaaaggtgcgctcattatgggacgtgcacaagatggttttcttgatcaagacaaatatgacattattttcaaaacagctgaaaatttagacgtaccgatttatctacatcccgcgccagttaacagtgacatttatcaatcatactataaaggaaattatcctgaagtaactgcggcaacatttgcttgttttggttatggttggcacattgatgtcggcattcatgcaatacatctagtattatctggtatttttgatcgttatccaaagttaaatatgattattggacattggggtgagtttatcccattcttcttagaacgtatggatgaagctttattcgctgaacatttgaaccaccctgtaagctattactttaaaaataatttttatatcacaccgagtggcatgttaacgaagccacagtttgatttagtcaagaaagaagtaggtattgatagaattctttatgctgctgattatccatatattgagcctgaaaaattaggtgtatttttagatgaactgggtttaacagatgaagaaaaagagaaaataagttatacaaatggtgctaaattattaggtttatcacctaacaattaacaaatggaggtcattgaatatggaaactttagaattacaaggcgctaaattacgataccaccaagtcggacaaggacccgtgctcatctttattcctggtgcaaacggtaccggagacatttttctgcctcttgcagaacagttaaaagaccattttactgttgtagccgttgatcgtcgtgattatggagaaagcgagttaactgaaccactccctgattccgcttcaaaccctgacagtgattatcgtgtcaaacgcgacgcacaggacattgccgaacttgcaaagtcattaagtgatgaacctgtctatatattaggttcaagttcaggttcaatcgttgcgatgcatgtgttaaaagattaccctgaagtcgttaaaaagattgcatttcacgaaccaccaattaatacatttttaccagacagtacttattggaaagataaaaatgatgacattgtgcatcaaattttaacagaaggcttagaaaaaggcatgaaaacatttggcgaaacattaaatatcgcaccaattgatgcaaaaatgatgtctcaacctgctgatactgaagaaggacgtatagaacagtacaaacgtacgatgttctggtcagaatttgaaattagacaatatacgcattcagatattactttggatgatttcacaaaatacagcgataaaatcaccctactaaatgggacagattctagaggctccttcccacaagatgttaacttttatataaataaagaaactggcatacctattgtagatattccaggcggtcacttaggttatattcaaaaacctgaaggctttgctgatgtattattaaatatgtggggttaattgattgttctctaataaaacagcttggacagttttcaaattatatttgatggctgaccaagcttatttttatttacgcttaaacgttcaaatcaactcgttattatacatgaaggcatgttaaccattctcttccactgaaaacactactgttccaaacattgatagtcttcttttgaaataccctttccgataagcaccaaatattctggcactttttttgaaaatgctacaggtgttaattcatattgtccttgtgtaaattgaatgagatacgtatgtgcggtgtcttcaaatgtcataaaccctttcaacctataaatatgagacggaaggcatgctaaacgttttataaactctgctttagtacatttgactggtgattgcacaaattgatgattaatcatttgatgtaaagacttatgtttattgtcagaagttgctgtcatttgtctaactgatattggcaaagtgacgctgccatgcataccgacttgtatatcggcctctgggttaataacttctaaatctttcaatagtttgctcgttgtttcaacatctgctgaatctattttattaacaaataagacagaacaatatgctaattgctcataaaataagccttggatgtctttagggaatgatttaatgtgtttatacatgcttgcgtctattacaccaatcatatgtgtaattgttgtaaacggagctaaaataggcgttaaacaagcatctaagacagagaccggttctgcaatcccactacattcaataaatacaatgtctggttgctcttttaaatataattgatgtaactgttctgatacatctgctttcattgcacaacagatacacccctctgtcagttcacttaaaggtatgtcttcagatactaaggcaccatcaacactcattttcccaaattcattcatgatgactgctggtttcagcgattcctttaatgattcagcgagcaaatgatttaagacagtcgttttaccgccacctaaaaacccacctataataactattttcatctgcgactctcctcttatacttcatatgaatagcatattccaagatagatctcctattgactgacatgactctatattcagttatagttcattttttttaaataatcagcattactattttaacaatgatgcctacaccaataactaaagacaatgatgtcaccatttgctttccaattaattttagtgctgactgaccacctaaatgtttcaaaagcatcgtcattgtgaccgagcacgctgtaaatgttgaactaaaaaacacaagtagtagtaactgtgttgctgtcattccttgtaataaggcgccctgatgcaaattaaacaagagcatgccgtcttttcgaatcattgaaaataaaatccctggtgacaattctgacgagatgcctaataacgataatataggtgtaaatatttgtgataaaacattcaaaattggcgttagtgataaaatactaacaataagacagattgtgataaaaataggtagcgcttgaacgataaacatttgtatattttgccacatttgtagcaacatttgacgtatatttggcatatgtaattgcctatcataaggtagcggaacgctaagttgttgatcattctttttcaaccatatcctattatgtaagatgccacctaaaagtactaatattaagtacggcataaatagccatgactttccagctacactaaaaatagataatgtcgcacctatttgataactacaagaactaccaaagcttattaaactcatacactgtgtcttcgtgcaggtatggcattggtgtgctgcttgtgaaatagctgctgcattacatccaaacccttctaatagtggcacgatatcattaccttgtaatcctatccataacattgacggttcaattgcccatatcatccatgatttgagtcctgtttgatcaattatagcagttgataaactaatcaatattacaaccggcaatgcccatacgagcgaatatgttccaagtgatagcacaccataatcaccaaataatatatgctgtaatatatcgtgattgagcaatgttgtttgagttaaatattctatccatgctgacacatactgattttgaaaccaatctgaaaattgataagcgataccgattggcaatgcaaacattaaaaatatcaacaaccaggctaaaaatgtcgcacttattttaggtcttaaatgtcgtcgctcatgttgaaatagtgtcaattgttctatcacatgttcactcgctataggcgaagaaactacactttctgccaatgaaatatctaatttctgttttatgattaataatcttaatttcgctttttctgttgcggtaagtttatccgcatgactaataaccaaataatgaggttcattaggtatgggcgtataatgcccagttctcatatcatatttcacttctaacatgtgcatgacacttcacaacatgaataatcatctaaatacatttgatttttttgataattttcaatgacatcttgtttagctggtaagccttcccgctgtgttaaaagatgtgcaagtactgcaaatcgcgctctaaatttatagatatagcataatttggcattatcattttcaactgttgcaccaatcataaaaatattcggataacgtgtcgattcatcatgtgttgttaatttaatatcttgatttgttgtcacaaataattgttgaacgattggattttttgttgcatcaaagccagttgctagtattggttcatgaggtgtaagcacactttgtccgctatcaaaactgatatgatactgtccattgttaaaatcaatatctttaactgtataatgtacattcatttcgatgcgagcaccttgcttaatgacattacctagtcgctgacgtgtataaggtgacaatctaacactaggatcagcatccggatcatttaaaccggttgtgctagtataaagtgcgatgtcagagccattttttgcaagttgatatgcagcatcaaagccactttcattacctccgataaccacatattgccccttattaaagttatcaaagtcttcaatttcactataatgaataccatatttaaatggctttttagggaaattataatcacctgttgcgacaaagatataatccgcgtgatatatctctgttgtcgttgcaatcgtataatatgcatcatctacagatatatttgtgacaactgtattttcaaagatattcagctcgtaatggttggcaaccacttgtaaatattcagcatatgtttctccggaaatatgttcttcattaaatgtaaatgctggtgaagtatccatggaaattgcattcatatcaggcatgccaaatccattagacgtaaatgatggcgtgatcgtacgggtcgatttcggccaatgtttaaatgaatgtcctactgttcctttttctaaaataatgacatctgttataccgaaatcttttaaggtaatggccatacctatacctgcagcaccggcaccgataatagccactttatgatgttgcatattaacactccctcaatgatctatttcaagttattgtttttgattataaatcgtaataattacgatttataaagtatagacctatccttgagaaatttcaatattaaaagaaaaacttccgttattgtagagaattcatctacatttcggaagttggtatgtgtctttttttaaaatttaaggctgctacgtttagttcaaatgattatgaatgacatttcatggtatcatccagcctcagtacttggagataacattttggcggtgagacagaaatcatatttttacaaaatttatttcgtcgtcccaccccaataaagaaaaagtatttctttattgttgtgtaacttctccacgttgtatttcactatccaaattttgtttcatattttcaaacaactcttgaaatctaacctcatcttgatcagaataacctttaaaaataactgaatctatattttcctcgttaaaataataaatttcatcttctacaacaccaatcggatatttacatgcagaatagtcaaacatatacttttgattttcaatttctacaattggtcctctattaataatcattaacttttgcgaaccttcttttaaataaataatgcttcctattgtttccatttattttcctcctttgtcaccgtctcaatttcaacattccttcgcatttccaagtcaatcatctcttcttccactttacgaatgccatgttgaatttgctgttgctgctcgtataacgcttccgttgaacgtcgtttcgcaaaatgaaattcatcgcggaactgttccatacgactagccatattgctactataataacgctcacctaaatgttgatataattgatctatcgaatgattaagcgcatcactttcatctatcaatgctttaacctctcgcttttcatcatataagtcatccatttgctcatgtttcgctgtgattattttattgatttcatccagtttattcgacatcatttcaccacgttttaatttttaccaatttcattaccaatcattacgtcagtttggtcaaaagcctcaccaactttttgtatattatcgctcgcagttcgtattgcttcagcaacagattgattcttactcatcaaatcatctatcacattatgagcattattatttccacttactgttgtactttcatctttatccggtttcgacacattattacatgtttcaacagcgcttttaatagatgatgatgcactattggtcttaaaaatatcactttgaactgtactcatcatttacacctctctccatttaaattattttaaaattattagaaactgtatcaatatatgatattcaaacattcaattatacttaaatattgttttatgattatattcaaaattattgtatcaataaatatgtatcattcctagaattttattgaacaaaaagttataaaatcacttttattgtaactcaaccttgttttacattacagaaattaacaatagcgattaaaattttattttccaacaataaaaacgcacaaatatttttattgaggcagctgtatcgcttctcattgtaaaaatatctgtgcatattatctatttatctcaatctaacgtcttaactaacttgttgtatcttgtaaaatcttatccatagaatgcgcaacactatcacggtacatctcaccaaatttcaataaatggaccatcaataaatataaacgataaaattcaagtctataggatgcaccttttgcgagtggataatgtttattatacgcatcataaaattcgctcgtaaaaccaccaaataccgttgtaataccgatatcgaattctctgtcaccatataatggcgctggatcaaataacgccggacgaccatcttgtaagaacatataattaccaccccataggtcaccatgtaataaagacggtttactttgatgcttttctaattccgccacaatttgacgtcgcactttgtcatatactttgatatcgttggcatcccatagccctctatttagcaactcatctttcaaatggtccaagcgtttgtcgacaaaaatggtacaccaatcgtcttgccaatgattatcaaaagaaatatcgccaccttcataaggtaatgagaagccaaatttgccttcttcttgttgctgactgtgtaattgagctacgagttgccctaattggcgttgactccctgaagccccttcttctaaatacgtcatcactaaatacgcatcaccgttaacctcgccacttgcaattactctaggtgccgtgatacctgcacgttcaaattcatttaaacctgcaatttctgcagcataaaatgattctttacgtccacgttggacaagtaagaaaaatgtatccgtatctgtttcgactcgatatgcttcgtttacatcaccaccactcactggtgaaatctctttaatatcttttaaaggtaaatgctctaaccattgttcattcatacaaacaccttccaatctacttactttatactataatattgcctaattaggatgatttaatcttaaaaacgttattcaaacttgcgtcaattttcaaaactttttagttttaactaggaaattatgtatggaaatgctagtctattaaaagaatatatttcacatatattaagttgaggatagtaagcctcaaatataatgaaataggagcatactcatgtacaaattaattaaacctttcttattcaaaatcgaacccgaaaaagcacacggactaactatcgatgcattaaaaacgttacaaaagtttccggttttattcccagtcgtcgataaactatttacttataagaatccaacgttatcacaaacgatacaaggtaatacgtacgacaatccaattggcttagcagctggtttcgacaaatcttgcgaagtaccaaaagcattggaacaccttggattcggtgctttagaattaggtggtatcacacctaaacctcaaccgggtaaccctcaaccacgcatgtttagattattagaagatgacgccttgataaatcgaatgggcttcaataatattggtatgaacaaagcactaagtcatttgcgtaaaaatgcttatcaagtacctgttggtatcaatgttggtgtgaataaaatgacaccttatgaagcgcgttatcaagattatataaaggttattgatacgtttaaacacgacgtttcatttttcacagtcaacatcagttctccaaatactgaaaatcttcaaaacttccatgataaagatgaattttcaatgttatgccaagctttaacagcatttaaaaaacaacatgatgtaacagtgccaatttatttaaaactaacgtctgatatggatttcgatggcttaaaagcactattaccagcgattactgagacatttgacggtatcatcttagcaaacacaacgcgacaacgagatggtttaacttctgctaataaagtcgaagaaggcggtttgagtggtcgtccattatttgaacgtaatttaaaattgattaagtatgcttatcagcaaacaaatggtgaatttttaattataggtacaggcggcgtattcagtactgaagatgcaatcaaaatgatgcgtcacggtgcgtcacttattcaaatttattcatcacttgttattgaaggcccaggtttaactaagaaaatgaacaaaggcatcgcacgttacttaaaagatcatcattttgacaatgtcagtgatattataggactagatgcctaatccaacatagtcaaataatactttaaaacttgctgaatcgtcttattaaaattatgatataactcaagaagatatatttatcaccatttttcaaaataatggcttaaatatcacatatcattaaatatagcgttttataacggaggcgtttgttatgactaaagaaacagataataaaaaaacagtagcgacttctgacaacaaagacacacagcaacaaaatcaacctgaagaagatgaacgtcaaggtttgaatggttatcgtaaaacagatcttgatttagaaatcgagcaagagctacgtgaaatgatgaaaacaggagaaaatgaaacgaaaaatgactataaaaagtttaaagtgttttcacttatttcaacacttgtcattgtcattttagcaattataagatttgttcataaaatgatgtaattagagtgagacattgttttatgtctcaggatccagttattcattatatctacaatatttacgattatataaataacccgagattttagtatgattcatttcactaaaatctcgggtttctatttgataatttttaatgggatatggcatgtatacgttcttgccttttatctcatttccaatgattaatctggatattgttctaaaaatgctttcgcttctttattaactgttttaaaatcaataccttgttgcatcgctgcaaagacacatccacaataacactgcctaaagatattatagtcattacacatttctatggaacgctcataacctttacttttcttaaaatcacttggcaaatagttcacatcgtatattttttggacatccataccaagttcattgattaattgtgcgttctttttaggtgataatgtgattgcactgccaaaataatcatagccatgttctacagctgctttcgctacaatatccaaacgcatttcaaaacaagcggtacaacgtaagccgccttctttttcatcagctaattctttatccttcaccattttcacaaacttatgcggttcataaggtgcttcaatatacttcacattcgcaccagtcttgcgattaaaatcttccacaaattgttcttgcactttagcacgtcgtaagtactcatttttcggatgaatatttgaattcgcgaaataaattgcaatgtctgcatattgtgttaaaaactctaatgtatatgtactacaaggtgcacaacaactatgcaataagattttaggtctgattgcttctctttcccactgcccgattaatttcttcaacaccttgtcataattaattttttgatttttcattttactgataataggttcagcattaatcatgatttaacctcccacatttaatcattaacttctattatatatgattcatattaaatgtcagtcaaaaaagttagaaattcattttaatgcatttatatttcgaaaatcccttatgtatctaaaagcattttttaaacttgaattttaaaacactaaacaacacatacgtctctgtgtcattttcattttttgtatgtcatatatatgtttacttcatttaaatcaatttcatcttataatttatcgtgtattttacaaaagattgacttcaattcatcgtaaaagttatacttttgccattttttaatgtaacatggtgttagtaataaaaataatacattgaggtgttttacatgacagcattattcccttatatcgcttttgaaaattcaaaagaagcccttgcatattacgaagaagtatttggtgcaactgacgttaaacgtttagaagttggcgaagaacaagcgtcacattttggtatgactaaggaagaagcgcaagaagcaactatgcatgctgaatttgaagtgcttggcgtaaaagtgttatgttctgattcttttggtcgcgctgacaaaattaataatggcatatcattattaattgattatgatgttaacaataaggaagatgctgataaagttgaagcattctatgagcaaattaaagatcattcttcaattgaaatagaattaccgtttgctgaccaattctggggtggcaaaatgggcgtctttaccgataaatacggtgttcgttggatgttacatggtcaagactatactgcaatccaacaataatgttattgataaagatatcatttaataagcttatgttatttagcaaggcaagccactctcgattcatggcttgccttattttattgtatatttttaattatcgttgctggcccttgattgacaatcgtattaaaatgccttattaagtcaactttgtctatacggtttggatcttctacccaatgtcttataaaagacaatcccgcacctgaaacataactcatgaaataagaaaatggtataccattaatttgatcattttcatttttataacgttgtaaatgacacataattaaatcataaagtttttcgtggatatttgaatctttacccatacgaaacatcaattgataaaatgcgatgtctttttctatcatttctattaaaacggtcataatttgatgtatgttatccgtggataacttaactgctccatttaacttctcatcatgaatgaagtctcttatttcctccaactgctggtcctctaatttttcaagcaaatcatacttatcataataatgcgtataaaatgtactacggttaacatcagctaaatctgcaatttgttgcacagtaatctcttctaattggtgttgatgtaaaagttcaataaatgcatttctcattgcaacttgtgattttctaatacgtcgatctatagtcatttatatcaagtcctccccaatgattataaacgttatgttcattatcccacaaatctccaacattgatgattggcacacaatgtttacctgtttaatataggtgatacaaacaaacagaaaaaggtgataacaatgaaccaacatttactaggaaatccaaaattaactgtaactcatgtcaatgaagttaaagccggtattaaccacatcgttgtcgacagtgttcaatatggaaatcaagaaatgattatggaaaaagatgtcactgtggaaatgcgcgatggcgaaaaattatatattaatattttcagaccaaataaagatggcaaattccctgtagttatgtctgcagatacttacggtaaagataataagcctaaaatcacaaatatgggtgccctttggccaacattaggtaccattccgacatctagttttacacctgaagaatcaccagacccaggattttgggtgccaaatgattatgttgtagttaaagttgcattacgcggtagtgacaaatccaaaggcgtcttatctccatggtcaaaaagagaagcggaagattattacgaagtgattgaatgggcagcaaatcagtcatggagtaatggaaatatcgggacaaatggtgtttcttatcttgcggtgactcaatggtgggtcgcatcattaaatccaccacatttaaaagcaatgattccttgggaaggcttaaatgatatgtatagagaagtagcctttcacggaggtataccagatactggcttttatcgtttctggactcaaggtatttttgcgagatggacagataatccaaatatcgaagatttgattcaagcacaacaagaacatcctctgttcgatgatttttggaaacagcgtcaagtgccattatcacaaattaaaacacctctactaacatgtgctagttggtctacacaaggtttgcacaaccgtggctcttttgaaggatttaaacaagctgcatctgaagaaaaatggctatatgtgcatggacgtaaagagtgggaaagttactacgctagagaaaatctcgaacgccaaaaatcattctttgatttttaccttaaagaagaaaataacgattggaaagatacgcctcatgtcatttatgaagttagagatcaattttataaaggcgaattcaaatcagcgtcagcgttccctttacctaacgcagaatatacaccattgtatttgaatgctgaaaatcacacattgaatcatgcaaagattagtagcccgcatgtcgcacaatatgactctgaagataaacaacaagatgtaagttttaaatatacgtttgacaaagatactgagttagttggaaacatgaacttaaaactatgggtaagcactaaagactcagatgatatggatttatttgcaggtattaaaaagttagatcgtcgtggtaatgaagttaacttccctgattttaatcatattgaaaatggtcaagtagctactggttggttacgcgtatcacatcgtgaattagatcaagaaaaatcctcaatcgcgcaaccttggcataaacatgaaacagaattaaagttgtcacaagatgagattgtacctgttgaaatcgaattgttaccttcaggcacgctatttaaacaaggcgaaacattggaagttgttgtaaagggtagtgaaattgtaattggtaatagtactcctggcatgaaaacacgttatgaacatgaagaaaccgtaaataaaggcatgcacatgatttatactggtggtaaatattattcacaattaatcattcctatcgttaattgatatgcagcaattacggtcgcttttgattaaaagtgacatagtgataggactgtataacaagagaaagccacacgcttggaatcttaaaccaaggtgtggccctttttattattgatggctatttaattttataacactatcgtattttctttttcatgaatcatttcaataatgacattatcttcattcattactgctactttaggtgcatggtttttaatttcttcttcattcaactgtgcataagtcatgattatgactacatcgcctacttcaacaagtcttgacgctgcaccgtttaaacaaattttaccactacctctttcaccagctattacgtatgtttcaaaacgtgcaccattattattattcacgatggctactttttcatttggcaagatgtctaccgcttccaatatatctgaatcaatcgtaatgctacctacataatttaaatttgactcagtcactcttgctctatgaattttagcattcatcattgttcttatcactttattcagctccaattattatattatctattaaacgcgcttttgaaaatttaacagctaacgagataaatatgcgtccagttatttcgtgttgttctactaattgaggataactataaacagcaacttcttcaatgcgtccacttatatgtgattcaagatattcagtaaccctgtctataattactttactttgacgttcaccgtcttgatacaacgcttgtgctaatagcaaacttttacttaaatgtaccgcttcttgtcgttcttgctccgttaaataaacatttcttgaacttttcgccaaaccatctgcttctcgaacgatatcaataccaataatttcaacggcatgattgaagtcttttaccatttgctcgacaatagccaattgctgggcatcttttttaccaaaataagcataatccggcataacaatattaaatagcttattaactactgttaccaccccatcaaaatgccctggacgcttcgctccttctaacacatcagctaatgggcctactttgacatcaatacctaattcacctggatacatatcttctactgcaggatgaaaaacaatgtccgctcctacttctgatactaattctaaatctttatcaatttgtctcggataagcatcgaaatcttcgtttggaccaaattgtaatggattaacaaatacactcacaattgtaatatcatttgtactaactgattcgcgtaccatcgttaaatgtccatcatgtaaggcacccattgttgggataaaaccaatcgttgtgcctgagcgtttggctgctttaacaatgtgttgcatctcttttaccgtagtaatcagcttagtcattgttattaacctcattcataattttctttttatacgtatattcttctgatggaaatgcaccagatttaacttcttgatcgtattgttttaaaccatccacaccaacactaaaatcagcaaattgcttcacaaatttcgctttatgttcaacaccataatttaacatatcgtgataaaccaatacttgaccatctgtaccttttcctgcaccaataccaatgactggaattgttaagtgcttgctaatttcttctgctaaatcatttggaattgcttcaagtactaacgcaactgcaccagcttgttctacatttttcgcgtctaaaataagttgctccgctgcttctttcgttgcaccttgtaatttataccccataacgccaacactttgaggtgttaatcctaaatgtgcaacaacaggaataccaattgccgttgctttttcaataaatggtgtaatatgcgctccttctgctttaattgcatttgcattcgtctcctgataaagctttagagcatgatttaagtcttgtgtcatagagatgcctactgcaccaatcggcatatcaacaactacaaatgtatttggtgcgcctcttcttactgcacgaccgtgatgaatcatatctgctaacgtcacttgtacggtactttcataacctaatacagtcataccaagtgaatccccaacaagaatcatatcaatacccgctgcttccacttgtttagcacttggaaaatcataagctgttaccatagaaattttagtttgcttttgtttcatatctattaattgacttactgttttcaatgttattcaacctctttttgcagtattattagaaatagtataatgaatcttttatagaaaggaaagaagaagatgttatcagttgcgattatcggcccaggcgctgtcggtacaactattgcctatgaattacaacaatcattgcctcatacaacgcttatcgggagacacgccaaaacaataacatattatactgtaccacatgcacctgcacaagatattgttgtgaaaggttatgaagatgtcacaaacacatttgatgttattattattgcagtcaaaacacatcaacttgatgcagttattcctcatttaactcatcttgcacatgaggacacgctcatcattttagcccaaaatggttatggtcaactcgaacatatttcatttaaaaacgtatgccaagcagttgtctatataagtggtcaaaagaaaggcgatgttgttacgcacttcagagattatcaattacgtatacaagataatgcattaactcgacaatttagagatttggtccaagacagtcaaatcgacattgtattagaagcaaatattcaacaagctatttggtataaattgttagttaacttgggcattaattctatcacagcactcggtagacagaccgttgcaatcatgcataatcctgaaatacgtacactgtgtagacagctattactagatggttgtcgtgttgcacaggcagaggggttaaacttttcagaacaaactgtcgatactattatgactatatatcaaggttatcccgacgaaatgggaacgagcatgtattacgacattgcgcatcagcaacctcttgaagtcgaagcgattcaaggctttatttatcgacgtgcacgtgaacacaatcttgacaccccatatcttgatactatttatagctttttacgcgcgtatcaacaaaatatgtaagcacatatataatataaaaagaccttaacgatgcatttagaaccacctgttcctaatatcgctaaggtcttttaattatattagactattcagcttctctaatttcttctgccacatctttatagtctattttcgctttaacaaacgtctcgttatttaccgggaaatgttgttggaatgtttcaaagttttgtatctcaacgacaacgtcatccacttcaaagtcaagaacatgtccaccataagctctttcatcatccgcaaaatgtatatgaaaaccagcagaccctacgccatgaaataattctggtgtaaaaaatccaacaatggcaccacgaatatcttgtcttttttcctcaggttgtctgcgtgctgaatcaatcaaacgtgtatatggcggttgctgagcaggcatcattcgtacatgcatatgtttaaatgtgccataaattttaacagccgaaaataaattctcacttaacatttcatttttaatttgtgcaaatacatcatcttgtgataattgttgcaatggaaatgtcttactcgctttaaaattagtaatcgatgcatacggtactttctcatcgccttttaattctataaattctttatgctcgttagcatgatatgcctttccgtctaaaaatattacttcgccatcagaccctgttaacgttgcaatccctaaattcccatgttctaacaattcattaattgtagctgtgccttctagtaagccagccattaacgtacctaatgtaccatgttgatacaagacattcgtcattccaaaaccatctccctatagttattcctcgttgtcatgctctacttcgtgattaatgcagaactactttcctttatactcaatgacgcctcaacatttttattcatgtcactaaattttcacgagtcataatactttattcaattattattttacgcaaaagtattgcctctatcaatgcttgctaaaaaaatggacctatcagtgccacgtgttactgcaacactaatagatcctcttaccattaaaatatttctaattaatacttaaaataggcttagtcttctaataaatatttaattgaatcaaatgtatcttctaatgttttaacagatttatcgaacaacgcttgttcttcggcacttaatggcatttcataaattttaactgcgccatgttggttaactaatgttggtacacctaggtaaacgcctttgtgaccaccatattgaccatctaattgtatagaaacatttaagacattattttcattatttaaaatggcttttgaaatgcgcatcaatgctaatgcaataccatagtatgttgaccctttagcttggataatttcataagcagcgtcacgtgtattcacataaatttcttccgctttagcttcgctaccagtttgttcttttaatgtgtcatatactgaaatacctgctacatttgcttgtgaccaaactgcaagttcagtatcaccatgctcgccaataatactagcgtcaacacttgaaggtgcaacaccaagttcttggctaattaaatattgtaaacgtgcactgtccaatacagtacctgaaccgataacacgctctgctggtaatccagtatattcttttacaaatcttgttaaaatgtctacagggtttgccgcgattaagaaatatccatcaaagccactatccataacactcttaacgatgctcttcataatcttagtatttttttcaactaattgtaaacgtgtttcacctggcttttgaggtgcaccagctgtaataacaactaaatctgcatctttacagtcttcgtattcacctgctttcacatcaactggtgaaggactgtggactgtaccatggtttaaatcttgaacatctgcttttactttgtcttttgcaatgtcaataattacaaattcatcagcaacaccttgcgtaaccattgcaaaggcatagcttgatcctacagatccatctccgattaatacaacctttttaccaaatgttttcataattatgtctcctaacctaattgaatttattttacacgtgactacacgtaaaaatatctatactgaaattaaagattaacaattttattttattataatattatgctaccaaattacaaacataaaactgagatgtaagcggagtcaaattacactctatcgccaataaatattgatatctcaagctttagcacgtaatttgaaatttgtgacaatttttagcattctaaaattgcgtaacgacgctatttaaaggctttaacaaactattgagctttctatttttttcattttaaaaaggatggctattcgacttaaatgacttactatataacctcctattttccgccttaccctcatcatatttgatgcatcattttatagtcaaagaattacatttcatacaaactagccaatcagacataaacatgaaattgattttaaaaatataatgtgcaaaattgttagaaaattagcaaaaaatagtacttattcatttaatatctgttataatcagttttatcatttaaaaaatctatggatgttatcaagacaagtcattaatacgtaacataaagttgtgatttttcagaatttttagacaaaatattgattatttgtgctatgatataacatattaaaaaacaccgtatagaattgtttatgaatgtttgggaggaaagtttatgggaagttttttcaataaaatagcacgaaaagaggatccggctatctatcaaaataaagatggtcatttaaagcgtacacttcgggtgcgtgatttcttagctttaggtgtaggaacaattgtatcgacatctatctttacgctacctggcattgttgctgcagaacatgcaggaccggccgttgcgttatcattcttactcgctgctattgttgctggtttagttgcatttacttatgcagaaatggctgccgctatgccatttgcaggttcagcctattcttgggtcaatgtattatttggtgaattttttggatgggttgccggttgggctctattagctgaatattttatcgccgtagcctttgttgcatcaggattctcagcgaatttacgcggacttgtgaaaccaattggcatcgaattacctgcagcattatcaaatccatttggtacaaatggcggttttatcgatattattgctgctatcgttattttattaactgcattattactatcacgtggtatgtcggaagcagctcgtatggaaaatattttagttattttaaaagtattagctattattttatttgtcatcgtaggtttaacagcaataaatgttagtaactatgtaccatttattccagaacacaaagtaactgctacaggtgactttggtggatggcaaggcatatatgctggtgtttcaatgattttcttagcgtatatcggtttcgattctatcgcagcaaactcagcagaagcacttgatcctcaaaagacaatgcctagaggtattcttggttctttaagcgttgctatcgtattatttattgctgtagcacttgtgttagttggtatgttccattactcacaatacgcaaacaatgctgaacctgttggttgggctttacgtcaaagtggtcatggtgttgtagcagctattgttcaagctatctctgttatcggtatgtttacagcattaattggtatgatgttagcaggctcacgtttactttattcatttggacgtgacggcttattaccttcatggttaagccacttaaacgacaaacatttacctaatcgcgcactagttatacttactattattggtgttttaattggttctatgttcccattcgcatttttagcacaattaatttcagcaggtacacttgttgcatttatgttcgtttcattagcaatgtatcgtttgagaaagcgtgaaagtaaagatctaccaattcctgcatttaaattacctttatatcctgtgttaccagcaattacatttgttttagtattgctagtattctggggattaggattcgaagcgaaattatacactttaatttggtttattgttggtatcatcctatatttaagttatggacttagacattctaagaaaaatgacgtagctgaataccacccaccaaaataaaaaataaaaaaaatcatttcccatctgattaacatccagatgtggaaatgattttttattttatattaagataatcgctattaccaaccttgtccagatatgtcatattgatctaagttacctgcttccaaagcagtcagtgcatcttctatagtgtttaacgccgtgtctaattgctcatatgttattaccaatggcggttggaatcgcaacacatttcctgctacagctataataactacgccatgctcaaagcagtaattacaaattttaagtgccgcactggcatcacgtgttttgagttttttgtcggaaacaatatcaataccaatgctcagacctttacctctaacatcgcctacactattgtatttagatacccattgatccattcgtttcctaacatattcccctttttccgcactagcctgaagaagcgactgatcttcaatcatttgaattgtggctaatgcagcttcacaactaactggattagcacctgttgtaaataaatgtgctggtgcttctaaacaattcataatctctttgcgtccaacaattgctgacataggcataccacctgctaaggattttccgaaagtgattaaatcaggcgtaaaattaaaatgcgagactgaactccatgtacctgttctcccaaaaccttgttgaatatcatcgacagcgattaaaataccatgttcacgacaaatcttttctaacgcttcaaaataccctggaactggttctaaaagtccaccatcgccttgtatcgtttcaataacaatacatgctacttcgtcagcaggtacatacttcgcaaacatttcttttaagggtgctaaatattcttctactgaattagcttgtggctgctcgtacataccacgatatttatctggaaacggaatatgataaaaaccattcaataacggaccataatgtttgcgcatatttaaactaatagctgacatagacaatgagccaaaagttgaaccatgatatgcattagtgaaactaatgatataaggacgccctgtatatgctctggcaaatttaatgatgccatcatttgcgtctgatccggttaatccgaaggtcactcttttttcaaaatctccaggtgcaatctcacaaagcttcttagctaaacgtaccaacggttcatgatacatatatgctggtgtataatgaataaatttatcaacttgtgcctttatcgcttctgttacttctctaggtgcatgacctacgttttgagaactcgcactcgataacaaatcgatatatgtcttcccctcaatatcaaccaatgttgctccatatccatgatcaatcactaacggataatatttaatacgtcctgatttcgcaaaataatgttcatcctcttgaattaattgatgtgctttactcatatacattcccctcccattgacagtattaatgtgcaagcaaagtggcctctcttaaatcgattataaaatccgatttaaaatcctgctcaaataccgtcatgcctctatgaatactatccaatatactaataaaattcagatttgtaaatatattctgataattaagaattttatatcaatctactttgtttatgcgcataattttgttcgattagggaattgtttactatattccatttgactctgaggtgatacgaatgcgtttaaaagtattgttccatttcattgctgctattttcatatcattcatgttgctatggatgaccatgttgtttgacttaataagcaatcaatcacatttaaaagctttattattgaatttagattttctaattccttctgacaatacaccatatattctagaaataatatgtcacttactaattggtagcgtcatttattttgtatttgtgttgctgtttcatacttctaaaaggctttactatctatgttatatccctttatttttcttatttatagcattgtatccctttttagtatttattgcgcaacgtccaatttttcaatttagtgtgacagaattaatcggttggattattacacatattttctttatgtcattaatggcgttagtcatacctagaataaaataatatttttaattaaactgacaattatttttcacattttatacacttttcaaggtttatgacttgagaaatgttctcatttttatcatactggaggtgtattgaaaagttaaggagtggaaagtatgaataaagagcaattagaaaaaatgaaaaatggaaaaggctttattgccgcattagaccaaagtggtggtagtacaccaaaagcacttaaagaatatggtgtaaacgaagatcaatatagcaatgaagacgaaatgttccaacttgttcacgatatgcgtacacgtgtggtaacttcaccttcattctcaccagataaaattttgggtgctattcttttcgaacaaacaatggatcgcgaagtagaaagcaaatacactgcagattacttagctgataaaggtgttgttccgttcttaaaagtagacaaaggtcttgctgaagagcaaaatggtgttcaattaatgaaaccaatcgacaacttagacaatttattagaccgtgcaaacgaacgtcacatttttggtacaaaaatgcgttctaacattttagaattaaatgagcaaggtatcaaagacgttgttgaacaacaatttgaagttgctaaacaaattattgctaaaggtttagttccaattatcgaaccagaagttaatattaatgcaaaagacaaagctgaaattgaaaaagtattaaaagctgaacttaaaaaaggtttagatagcttaaatgctgatcaattagtaatgttgaaattaacaattcctactgaaccaaacttatacaaagagttagctgaacatcctaatgttgttcgtgtcgttgtattatcaggtggttacagcagagaaaaagcaaatgaattacttaaagataacgctgaacttatcgcaagtttctcacgtgcattagctagtgatttaagagctgatcaatctaaagaagaattcgataaagctttaggtgatgctgtagaatcaatctacgacgcatctgtaaacaaaaactaatttatacattaaactattttttgatataaactactaaaaaggactcatacatgtgctttaaaggcattgtgtatgagtcttttttgattaaagttgattttgccgtatgtattagattacgtaaaaaaatcggacagctgaaaaatctttaagatttctcagttgtccgattttaaatatagctattagaatttagttttcgtagtaacctaattctaagtcttttgaagtttgtttacggatttttctcattaatttttcgtcttcaattaatgattcaccgtatgatggaatcattttcttaattttaggtgcccattcagttttgtattcagggaagttacgttctaatacttctaacgcaactgaaactgaagttgaagcccctggtgattcacctaataatgcaattacagtgtggtcttgtgagttaaccacttctgtaccgaattggatgaatcctttaccgtgttcaggtgtatctttgataacttgtacacgtttaccagcagtgtataattgccaatcttcattacgtgcttctggatagaaagtacgtaagtggttcatacaaccttcttttgtcataattacttggtcaaatgagtatttaattaaaggtaagtttttaactgctgctgctaataaagttgtaatgttgtatgttttaacagacttgaataaatctaagttagaaccatttttcaagaatttaggtccaacattagcaaatggtccaaataataatgttctttgaccatcaatgtaacgcgtatctaaatgaggtacagtcattggtggtgtaccaggtggctctttaccataaactttggcatcgtgttgttcaataacttgtgggtttgtacaagctaagaattgaccactgatagggaatccacccaaatgtttactttcagggatacctgttttttgtaataatggaattgctccaccgccagcaccgatgaatacgtagtcagttacttgtttgaatttctcaccagttaggcgatttttaacagtaacttcccattgaccatttgataattgttcaaaatcaacaacttcatggttaaattgcactgtagcatttggatgtgcttcaatgcttttagccattttacgtgttaattcaccgaagtttacatctgtaccttcgtcaattttacttgccgccatgataccagggttatcttcacggcctttcatcatcaatggaatccattttttcattacttcgatgtcttcagtatattcgatattatcgaacatagggaaagctttcatcgcttcgtaacgatcttttaagaatttaacattgtttttacctctaacataactgatgtgtggtaatggattgataaattctcttgggttctcgatgctaccgcttttcactaagtgaccccagaattgttttgaaatctcaaactcttcgttaatcactttcgctttttcgatgtcgatagaaccatcaggttgtaaaactgtgtagttcaactcacataatgctgcatgacccgtaccagcattatttctttcgtttgaactttcgattgcaggacgatccaagcgttcgtaaacgtggatattccagtctggctcaatttcttttaacattgaaccaaatgttgtgctaagtacaccggctccaattaaaacgatgtctttactattagacttagccattggtttcacctctccaaaaattgtaaatgtgtatcatcaatatgaaagttacataaaactgacatatttctttaaaatatcaacgccattgataacttcctgttttaattgatacgctgtaacaaaatactatagttagtgcttacatgtatatgttaaagcaagcagtggtaaatgtaaattataattattcattaactttgcaatatattaaatcttttattcatagaagataaatatcaaatcaatcataattatttgacaacaaatagctaacgattgttttaatctacatttggcttatagcattttaaacctatactctattttgatacaatataagtgtaaaatcaatcataaaaaggatattcaatatctgcatccaagaaaaacattacaattacctttaatattgaaaattattttgaatcttgcacttataggtattgtaattatcgttctaacacatactgagtttcaacttaatgccggtgatagtaatgtgtttttattaaactgggatattcgaggtttaacatcttatattttctcattcttaatactggttgcgcttgtttctaaactaattttaatatttataactagacgacaaagaacatcataaataaacaagcagtccagtgcgtatcatcataccttacgcattggactgctttgctatgtttattgattgctatctttttgttgttgccatttttctatttcagcatctcgtagttcaacacgacgaattttacctgagtttgtttttggtaagtcgtcaacgaattcaatctctctcggatatttatatggtgcaacttcatttttaacaaattgttgtagttctttaactaacgtatcatcacccgcagtatggtcctgtaaaataacgaatgctttaacaatatttcctcgtatatcatgaggttttgctactacagcacattctttaacggctggatgattcgttaacgcatcttcaacttcaaaaggcccaatcgtatagcctgaactaataataatgtcatctcgacgtccttcaaaccagaaataaccatcatcatctacatgagctaagtcaccagtgatgtagtatttacctgtttgcgctttcgccgtacgttctggctctttataataccctttgaaaagtgctggcaaatcaagtggtactgcaatattccctttcgtattagcaggtacgctattcccctcatcatctactacagtgaccgaactacccggaatgcctttacccattgatccaatcctctgtggtgtatcttttaaaaagcctataagcaaggtactttcagtctggccatatccatctcttacagttaaattaaagtatttcttgaattgttcaactacttctcgatttagtggctcacctgcagaaacggcactatgtaaatgcgttaagtcataatcatttaagttctgtaatttagccatcatacgatattctgtcggtgtacaacataaaacattaatttgatatttttgaagcaattctaagtatgtttcaggactgaaccttccattaaatacaaaagcagttgcacctgaacctaatacagataagaaaggactccatacccatttttgccaacctggtgctgctgttgcccaaactaagtcatcttcattaatacataaccaatgttttggtgccatttgtaaatgtgcaaatccccatccatgacaatgtgtaacggctttaggattgccagttgtaccagatgtatatgacagaatcgccatatcatcacgcgtcgtatctgccatttctagtttgttacttgcgttttctttttcagcttcaagtgaaatccatccatctttttgaccggcaataacaaatttagttaacgcatcatattctttaattttttcaaattcaactgtgaatggctctagtgcaataactgcattaatttcaccatgtgtgatacggtattgtaaatctttagttcttagcatttcagaacatggaatgattgcaacacctaattttaaagcagcaatatataattcatacgtcgcaatagatcgtggcatcataatgagtactttatcgcctttagataaaccgtgcgatgctaaaacattacctactttattagactgttcaatgagctgttggtaagtgactgatatatcttcgccttcagtattatgatataaaattgcctttttatctggtatgtggctatatttttcgatttccgaaataatgttatatttttcaggcgcgaatagagctgacttttgcataactaacttcctttcatacatccacttttcctgtgatgaacattgtaattttataaatgaattatatacatcatacgcctatctttacagaattttcaattaaatagggttaaataccaaagtcctcgacactacactttgacatgacgtagcattcaaggactttcaaatgattgagggttgatatctcgggctagaccatatcagctaattcaatacgaatattgtatgataattcacgattaattatttttacatctgcacctttcgaagtgccacgatgcttgtgtgtatgcttgtactcagctgaattttgccaatgataaaatgcttgcctattttcccacagcgtaataatgatatagtgtctaccagctgttctaggtcttaaaaaccttaatgctttaaatccatcaacgttttttaaatgcttattacgtcgcaaaaatttttgctcgaatgtttcttcttgtccttcgttaatatataaatgatttaacacacataatgaatcatttgataaatcatttatcgcttctagcacatcgtaatatgcagtgtcattatttttttgtattgtgagacaatcatccagttcttctattacataacttctatattcatcataaattttcataataaatgccttcatttcatttatatttttggtcatattactttatatctattactaattcattcccgtatttattaattacaatcatagtttggcttctttttaaaagataagactttgtaaaaagtattaatatttcatgcaaatgggggacaggagtcgcccactatttttgtgtcttcaatttcatgatcattatttaacattagtcatgaaaatagccgacaacttcatctgtgaaatcaccggccttttattttagctaactttatttctgattttacgattttaattgatcatacagagaaagtgatctttttacaatttctaaaaactcatgatctatattggacatttgatgaaaataagacaaaatgttttctgttagcttctcttgttttgggaatgaatcatcttctttaatccaaatcgctaattcgcctaatggtgttttatcatctttaaatgtttgtatatattcgtaaaagctcatagtattccttctctcaatttacttatataaatcctaccacgaaagctttcaagaaaacacaattaaatgtctatttagtgaactttttaaggttgtgcactcttttaatgtctgccaattaggtcaattaatcatcacaatgtacaattaactctattttcagttcatatactcacacaccgtttttgaacaacacattaacttctcatttagataaaacgcaaaaaagcctggcaccaatacaatagatgccagactaagagtctactatataaatttatttagcgtatggttttacttcgattgcaccttcattttcatcatgaacaccatgcttataataatcaatatattgtggctctaaaggctttctgccacgtataatgtctgctgctttttcagctaacattaaaacaggtgcgtgtatattgccatttgtcgtacgtggcatagctgatgcatcaactacacgtaaattttccataccgtggactttcattgttaacgggtcaactactgccattggatctgaagcaggacccattttagcactacaagatgggtgtaatgctgtttcaccatctctacgaacccaatcaagaatttcttcgtctgtttgcacttctggtcctggtgaaatttctccaccattgaatggatccattgctttttgagataagatatttcttgctacacgaattgcttctacccattcttttttatcttcttctgttgataaataattaaagcggatacttggtttttcgaatggatctttagatttgattttcaagctaccacgagagtttgaatacattggtcctacgtgaacttgataaccatgtgcgaccgctgccttttgaccatcatatcttacagctattggtaagaaatggaacattaagttaggataatcaacttcgttatttgaacgtacaaatccgccaccttcaaaatggttagatgctgctgcacctgtacgtgtgaaaatccattgtaaaccaataaatggcatgcgcttgatatctaagcttggctgtaatgatacaggttccttacatttatgttgaatgtatacctctaagtgatcttcaaagttttcacccacaccaggtaaatgaacacgtggctcaatgccttttgattttaggaactctgaatcaccgataccagataattgtagtaattgtggcgtattgaatgccccaccagacaaaatgacttcattagcatcgatggtatgtagtttgccatttttcttatacgtaacaccagttgctcttctaccttcataatgaatttcagttacaaaggcacgtgtttcaacggttaagtttttacgcttcatcgctggatgtaaatatgctcttgaagctgacattcggcgaccacgatgtacttgactatcgaacggtccaaaaccttcttgtctaaatccattcacatcaggtgttttatgatagcctgcttcaacacctgcatcaaagaatgactggaataaaggattcgttgctggccctcgttttaacttaattggtccatcatggcctctaaatttatcataaggcgctgcaccgtatgttttttctaattttttaaaatacggtaaacagtgcgcaaaatcccaagtttccataccttctggttctgcccagccttcatagtccattggattaccacgttgataaatcatgccattaatcgaacttgatccacctaaaactttacctcgggcatgtgctactttacgaccgcccatatgtggttcttcatctgttgaataaatccaatcgtaaaatttattgcctgaagggaacattaacgcagcaggcatttggataaataaatcccaaaaataatcactgcgacccgcttctaatactaagacttctttatctttatcttcactcagacgattacctagtacagaacctgcactgcctcctccaatgatgacataatcatatgatttgtttttgttactcatcgttatgacctccaaagtttgttgtatttcaaagtgagtattgcatgaaatatttgttagtggctgattggttatcgttgaattgctaaacttagctaaccaaaacactcgcttttccttttacgattgttactaacagtaatgaaataatctatgattcattttgcgtttagtccaaattatcaatcaacatttcgccacttatacaaaacaaagtgagtgtcttgtgttcttacaatggcactcaccttatctaatttttatttgctaaaccaattcactaattgtggatttgtatttgttaaaatgtgttttgaaacaaggtactcttctaagccttctttgcctaattctctaccgatacctgattgtttgtatccaccccatggcgcttgtgcaaaatatggatggaaatcattaatccacaccgttccaagtttcaacttgttagcaacgcgttgtgcttttccaatatctttagaaaatacagcacctgctaaaccatatatagaatcattcgctaattgaatcgcttcttgttcagtttcaaagccttctacagtaacgacaggtccgaaaacctcttcttgtacaatacgcattgacgtatcacaatttgtaatgactgttggctcgaagaatagaccatcttttaaatcatctctatctggacgtttaccaccaacagcaattgttgcgccttctgctttagctacatccatataagattcgatcttattacgatgttctgttgaaatcactggtcccatttcagtatcagcatcaaaaccattacctaatttgatttttttcacgcgatcaataagtgcttgctcaaatttgtctttaatactgttttgtactaatattcttgatcctgctgaacaaacttgacctgcatggaaatatccaccatttaacgcttggtctactgccaattcaaaatcagcatcatcaaagataatgtttggatttttaccgccaagttccaaggcaatattcgtaacattattagcagcatttttcataatatgcttaccagtctcaatgccacctgtaaatgatacaaggtcaacctctttatgacctgacattacgtcaccaacttcagaacctgcacctagaataagattaattgttcctttagggaaaccaacttcttccattaattcaaaaacacgtattgttgttaatggtgtaatttcacttggtttcataactagtgaacaacccgtagcaagcgctggcgcaattttccatgatgcttgtaataacggataattccaaggtgtaatttgtgtaactacacctactggttctttaacaattttgctttctgtatctggaattggtgaatcaatcatttcgccaccgtctttatctgctaatccagcaaaatacataaacacattatgaatatcatccatatctgcatatgattcttctaacgtttttccagtatctaatgtttctaatcgtgctaacgcttcgcgatgttctttaatcttgtccgcgatggcacgtacttttttacctcttgtttcagcagtttcttgcgaccattcaccagactcaaacgcacgtcttgcagctaagattgcacgttctgcatcctcttttgtcccttcagaaaccgtaaatatcacttcttgattgtaaggattgataatatctcttgtatttttattcgcgctttcaacccactcaccatcaatatattgacgctgagataaatgttttaaaagttccattcaacaacctccgttaagtttgttaaatttttatttaacgaattttacaaacttatgttagcatagaaatgaaaaatgtgtcaatttacaaaacaactcaagaattaagttttgtaagttcgttagatttttatttaacgaaacatttaactttaatgctttaaatatttttaatgtctttttttagaaaaggttttataatgtattagtatttattttaacgtgaccaaaatgatgtacggaggtgcaatgatgactcgttctcagaacaaacagcaacaattagaacaagcaaaagatattgtaattaattcaattggacagacaatggatttgtatggcactaatagaagtgtaggaaacttatatggcacaatggtgtttgaaggcagtatgacgcttgatgaaatgcgtcatcaattgcaaatgagcaaaccaagtatgagtgctggcgttaagaaattgcaggaatttgatattgttaaacaacaatttacgagaggaagccgcaaacaacattttatcgccgagaaagactttttcatctttttccgaaactttttcactaaaaaattccagcgtgaaattgacatcaatgtcgaagcagtaaaagatgctcaagctattatcaattcattacttgaaagcagtgatttaactgaagctgaaacacaagaggcacaaaaaattaaagctcagcttgatcatacacatgtttattacgaatggttagaacagttaaccgaagcgattgaaagcggtgaaattttcaaatatttcccaattccagaacagccttctgattctgaaaattaaaattgactcaaacaacgacaatgatgattatgcatgataaaaacaatgcaataggtccacgaaataaacggtaatttctatctcaataaatagaaattaccgtttttgttttatatgacaatcaattatggaggtattttctagggctttcttagattcgttacattgcttcgccaatatatttcaattagctattctcgccctcacgtactctatcaataatattttgtatttgttcacgtttttcatattcattttctacaaaataaactaacggttcatctttgatagtaacccaaggtacaagtacatcaaaatctaattctttaaccatctctaaactttgaatagatttttctctatcacttgaacctaatataactgtacgccatctcttcccttcaaaacatataaaatctccagtaaataagtaacggtgatgaccatcatcccataaaaatagtgtcgtccctggtgtatgtccaggcgcgggaataacttctaaatccttatccaacattacacgattactaaattgtttttgaacagaaatcttatgtttcagtgcagccacatcattttcatgtataaagtaaggggcttcaacttgattagaacctcctatagattcatgatcatgattcatcaatacttttgaaacaccacctaatgatgcaatgtcttgttgggagtcacctaagtgtccggaatgatagataacaatattacctgtttcacgttttaaaataaaagatttaaatagaaatcgattatcaaaaggcagttccgaagtaggtgtcgcatataagttttttgtgatggattctaaactgtcatgtaatttggactgtttatttttaaattgattagtcattttatttcatccttcgattaatttgaattgtacatacgcagtaccctttatttaatttaataatcaatgagagtctttcaaacttcgatttagaatatgcttcatacaataaataagtacttggagcactaaaaaattaaatcttttagtacaacattaatgaaaacctaaaagttcatcctacaatgctactaaaaaaaggggaatggaacagaaatgatattttcacaaaattcatttcgtcgtcccagacccgctttgaattataaattatcgtcttgttcttcttctgatacttgaacgattcgcaatgaacgacgttcaacttcttttaatttttcagcacgcgtttcaagtttaattctatcgcgccctaaaatgattaaaaatgatatcatcatgaaaataaaaataacaattaatggcacacttgccagtattgaagcagttttcaatacttctaatgcacgttcaccaccaactagcatcaatgaaaatggcaataagcacaatgcaaatgcccagaataaacgattggcacgtaatggttcgcctaccacttttttctgagatgctgccgctaaaatatatgaacccgaatcaaatgttgttgctaagaataagaaagcagatactaagaatagtacaatcatcaatgatgggaatggtaaatgatgcaccacttcaataatggttgcctctgtaccatgtgtatttaaatattgtgttacattaaactgtccagaaatttgtaaatacacagcatagttaccaaaaataccaaagaataatacgcatccaagcgttccataaataattgttcctagcacgacttctttaaggcgtcgaccttttgaaattctagcgataaataaaccgataaatggcgcatatactaaccaccatgaccagtagaatattgtccagtcttgtgggaaattcgtttcttttcgacctttaataccaccgaatggttctaaccatgttgccatatgaaagaaatctctcaacatatttccgaaccctgtcactgtcgtttccataataaaaacagtcggtccaataataaatataaaggctaaaagtacaaaggatagccaaacgttgatatcacttaacttttgaataccttttttcaatcctgtatatgaactaatggcaaatataaccgtgattgttaataaaatggccgaacgtaaaatcatatttttaccatctaaaccagttaatctttctatgcctgcagaaattaatggcacacctaacgctagtgatgttgccgcaccacctagcaatccaaagataaataagatatctacaactttacctacaaatttatctgtttgaccttttaaaatcggacgacaagcttgactaattttatacaccggttgttttttaacaaatactaaataaccaattggtaatgctggtagaacataaatagcccaagcaattggcccccagtggaacataccatattgcgtcgcatattggagtgcttcatcactcatacttttcgcgccatttggtggaacttgatagtaaaaagcccattcaataacgccccagtataaaatatcagagcctatgcctgcacaaaacagcattgccgcccatgtaaatgtattaaattctggtttatcacttgctttaccaagtgtgacattaccatatttaccaaatgcgatatacattacaaagcaaaaaatcgccagccccataaataaatatatcgaaccaattgaatcagaaatggcactattaataccagtgatgatatcttcacttgcttttggaaaagccatcataggtataactgcaaaaagaagtacagctactgtccctataaaggtcgtccagtccataactttctcttttttcaattgtgctccccctaattattaattttatgaatcctgtttcgatttatctcaaaatgtaataattatattgattcacaaaattgacaataactaacatttaataataatgcaaatttcatacaatttgaaacttggcaattattgaatatttatataatttttcccgtaataaacaaaaccttaatagcgctaaaataacagtgttaagttacgatttaacgaatttaacaaattttactagaatggcatttaagaatatttatacgttattaacgaatatttatttattgtaaaacgctaccaaaaagttagacttccttcccactaaaataccacttttctctttcaacttttttaaaaaacggatatgcaacttttagtattggtatcaaaatgattgttaggtcatattctatcaatatatttttataaagaattgcttttattaactttcaattatgtacctaacctaaaaagaagccaaggcaacgaatgttaccttgacttctaatacatattcaactaactatatattcaatcatacgcgcatgcgagagtgattgttgtacatctataatgcgttgatttaaagaacctttatatggtaaatcaggtttgaataagtgttgtataaatagaccatctactaaaacgtcaatgtatgataataactctcgacgttctgtacaatcatttgctaaatattcatataaaaatccagtccatacccaaattgtctttgtatttccaaaacgtgctcgaaatgctttgacaagatttaatgtaatatccaaattacaaaatggttcgccacctaatagacttagcccagatatataatcatgatcgcaatcatctaatatttctgctaatatttcatcagtgtatttctcgccatatctgaacttttgtgaggctttgttataacatccaacacaattaaatggacatcctgatacataaacactgcatcttactccttcaccgtcaacaaagctatttgattctattttagcaatataaccttgtccttgtttaatgtctaaaagtatcattctttaggcgctttcatatgttttactcgtgcgcaaatttctttatgacggcctttaattactggacgttgaactggattgcctaggtaaccacatgttcgtttaacgacatcaactgttttaggattatcattgccacagttcgggcatttaaatcctttttcagttgcttcaaaatctccatcgtaatcacattcataacaatgatcaatcggaatatttgtacctaagtaaccaactttgtcataagagtagtcccataccgcttctagtgctttcaaattgtgttgcaatttcggatactcacaatagtgaatgaaaccaccactcgcataataaggataatctttttcaaaatctaacttttcaaaaggtgtaacatctttacgtacatcataatggaaagagttttgataatatcctttatctgtaatgtctttaatatctccaaatctctcttggtctaaacgacaaaaacgatccgttagcgattcactcggcgtactgtaaatactgaaccaaatgtcatataattctgtccatttcgtttgataacgtttcatttctttaagaatttcaagcgtaaatgcttttgcttcttgagatgtttcccagtctggaccatagaaaacagtagctgtttcatacaaccctatatagcccattgaaatcgttgcacgtttatttttaaataactcagcaacatcatctgtttcttttaatttatagttaaatgcgccacttttatataaaatcggtgcgttattcggtacagcatctttcaaacgatttatacgataaagtaatgcatcatgtaacacatcgatacgttcataaaagatttcccagaatttcgtcatattaccggcagattctaatgccattctaggtaaattaagtgtaacaacaccaagattacaacgaccattattttcaaaatgaccttccgcatctttccaacttggtaaaaatgaacgacaacccattggcgctttgaaatcacctaatatttctacgagtttgtcataatttaaaatatctggatacatacgtttcgttgaacactttaatgctagttgtttaatgtcatagttcggatcttgcggactaaagttggttccttttttaattgaaaatacaagtttcgggaaaatcgctgtcgtgcggtcttttcctaagcctttgatacgagtatttaagatagcttgttgaattttgcgacttaaatgatctgtacctaagccgaatcctaatgttacaaaaggtgtctgtccattagatgtatataaggtattaatttcatattctaaactttcaatcgcatcattgatgtctttagtgacttgttgatcaacataacgatcaatttcagattctttgacaaattgctttgcgatattcctatgttgttcttcattatgtcgtgcatatgtactaagtaattcgtcaacgcggtcaaccgtacagccaccatattgactgctagaaacattggctataatttgtacaagctgcgctgatgcagtttgtattgattttggtgaagttacattcgcgttgcctatttcaaatccattatgtagcatatttttagcatctattaaacaacagttagttaacggttggaatggatgataatctaagtcgtgaaaatgtatgtcccctctttgatgtgcatctgcaacgtgctttggtaataaatgatttaatgcgtaagatttagaaacgatacctgctgttaaatctctcattgttgaaaatgtatcactatctttgttagcattttcgttaacaatagcaggatctttagaaatcaaacccgttaatgcttcttcgatttgattcattttaccccttcttcctatatattgtgtctactcattacgttataccactatatatagtattttcaaatttttattagtctgttaactaaaacgtcacaaagttattaacatttagtgaaattcatatttctacacaattatttcattaatttttaaaattgtttaaagattcgtccgtcatttcgacatgtttatgcaactattatttcattttgcaacgtgaccatagtttctattttttcatacttaaatcgtcacaatgcccatcaacattgcaattactaacataacgatagcgaatccccaaatccaaaagaatgcatacttaatatacgtgcccatgtttgcctctgctaaaccaattgccaaccataaggctggtgaaaatgggctgacaaatgtacctataatattccctatgaccattgaataagctgttgatacagacggtacaccaaattgccctgctgtttgttcgacaatcggtaacacagcaaaataataagcgtctgtgctagttagtaaatctaatggtacgccaagtaaacctacaataatatgcaagtatggtcctacttctgcaggaatcactttgattaaattggtcgcaatcgctttaagcataccggtttcatttagtacacctaaaaacatacctgctgcaataatcactgcagccatcattaatgcattcggcgcatgcgctcttaatcgttccatttgttcatccactgatttaaaattaataacaagtgccaacgaaacacctatcatgaatgcaaattcaggtggcgcaatatttattaacatcgatagaataacagctaaagttaaagctgtattcacccattttatccatgattttgttcttgcacgtccttttacaggaaaccttacatcttgatctcgttcatatacttcaactaatttatgtacatctatatcttgtgtttgcggtaattcatttctctctattgcttttttgatacgtttctgttctttaaatccaagatataccgcaaacaacataacaagaatgaaacctattatttgaataggtattaatccataccataattcattgacacttttggcttttaacactgcagctacacgagccattggacctccccaaggtaccatgttcataatcgccgcgcttaatgctaatagtaaaatcaataaatatttattcatatttaacgctttatataaaggtaataatgcaggaatagaaagcaaaaatgttaccgcaccggccccatctaattgggctattgtgccaattaaagctgtcattgcacagacaatgacgacattgcctcgtgtcattaatattaagcgtttgacaagcggcttgaataaaccactatcgttcatgatgccaaagaaaataatggcaaagataaacataataacaacgttgatgacttgatctaaccctttagcaaaaaatccaaccaaatctgtcacactatatcctaaaatcattgcccctaagcaaggtatgattgtcatacctacaactggatttatctttttggcaatgagtaaacctacaattgaaataataataatgagccccattactgttaaccacatattatcactattcatattattttctccctccacttttaatacaatttacataatccccctctttaacttaaatattataattaatataattttttatatttaagttatctcattttatcaaaaaaatcttttttgcgtaactatcaatagtgaagtttgattttcctacttgataacatggcatgactaatccttgtatatcctgtcctgtatttcattttgatctatcatttttattattgctttctattgcacaaaaaatctggctaaaggtcgctatgatagtaacgacttcaaccagatttcaatttatccacctattttattaagtttgttctacgtatctttttctctattgtaatattcatatttaaaacgcatatcattatcgcttaaatccttcattattagactattcacaaagccgcccatgtcttaatttcaatgattaagcgttaaagttaaaataagaagacttaccttagacggttagacggtccgctattattatcttacatccaaccacgctaaaaattgagcttgtttgtcatgatttaaatattcttgtgacacaatttgtgacagtaactgttgcttttcgttatatgttatatcaagtacttttattttctgtcggcaagtatataaaaagtcgatatacgaactgtatgatggtggatataacgcctcaagctctgccataattgattttgtcaacttaggactcgcaccatcagttgatacactgatagttagcttgtcgcggtgtagtgcacttggaaatacaacattgccatttgatgcatctccaacattattaaaaagggcatgctcaggtaaggctttttttaccgcttcattgacacgtggctcattggttgctgcaataactagatacgcgtctacaatatcgcttggttcaaattctttttctttccatatgacgacaccgttatctaccatattttgaagtttttcagtgattgtcggactgatgaccgtcatatgttcaacgtattgatttaatgtttgtgcccgacgacttgcaacgacgcctccaccaactatgacgacatttttatttgttaaatctatcattaatggcatattcatgttgagcaacatcctttatatctttttacatcattacaccttaaaatatttaacaccaatcgctaataaacatcacgttgatagcgttgttgttgtttcatttgtcgcaataataactctgcttcttcttgagaaatatgacgttcttttaccaatacatctttaatggcttgatggacatctttcgccatacatttttcatcgccacaaatatagattgctgcgccttgctcaatccattcattgaaacgtttactttcttccattatacgatgctgtacatattctttgtgttcttggtctcttgaaaatgctaaatctacgcgtgttaagtttccattttcaagccattcttctatttcttcttcatataaaaagtcagaactacggtgttgatcaccaaagaacaaccatgtttttccagtcataccaagttcttcacgttcttgtaaatatgctctaaaaggagcaattccagtacctggtccaatcataataaccggtatatcttgcttcatcggaaatttgaagttcggatttttcttcaaataaattggtactatatcgcctggtttaattcgctcagcaaaatgaaccgagcatacaccttttctctcacgtccatgtgcttgataacgaaccgtaccaacggtaatatgcacttcatctggcgttgccataaaactactagaaatcgaatactctcttggtggtaattttctaaggatttgatacatattctcaggttgtaattctatagttggaaaatctgttattaaatctataaagtcccgatttataacatattcacgcgcccatgactcatcttgaatacgttcagataattcttcattgtcaaaatagatatctgcatttttcaataatggcaatgttaatttagtaaattcaaaatgtgatgttagtgcttcaacaataggaactgtatcaccatgatcattaattggcaccggagattgcggatcccaacctaacatgaatattagtttttcaaccaattcagggtcgttttgcggtaatgctactatacaatctcctggttcatatgattcactaaaatcatcaagtaaaaattctatatgtcgtgtttctttatttgaatcggtaccatttaaattgatattcgctaatacttctgcttggtatggatttgatttagaatatttcttttctttggcagacttaattgattcacttatcaccgattcactttgaataccttctgatgtggtatcaataatattaatgatgtctgccatccacttttctgcgtcttcttcataatcaatatcacaatctacacgcttacatatacgctcagcgcctagattttctagtaaaacatctacatctttaccggcttgacagaaaaattcatatgtttgatcacctaaagctagtactgaatatctcacatgatttaaattaggtgcgttatcgtcttctaaaaattcaaagaaatcccatgcattatcaggcggttctccttcaccatgagtagacgtaataataaataaatcttctaactgcgcgatgtttgtcgtatcatattcatccattgacatcaaaacaacttgatgtccgatatcacttaaacgttctgaaaaaatttcagctaaacgcatggcattacctgattcagaaccatatagcactgtaacatgccgctgattagcttcgatatgtggctctttattttgtaacatatacgttgttgaagttgcttgttcttctgatatttgtgattgttgccacacttctgtctctaattgttgttgattactatcacttgtcgtatcgttactattagctagtaaaaaaccactaagccactgttgttggctctctgttaatgtttgcagcagattgttaatctctgtgacttgtttttctgtaaatggactattagatgtatttaatttcaaatgttttcacctcaataaacttgaaatagatgattgactctttttttatcgatagtttagtcaattttttaatatgtatggtataaattaaaacaaacttgagttgtgtctgatagttatacttgcaaatatttacaaccttcatgttgcttgaatgacattatcagtaattcagacaaaactttgattatgtcgtgtcagttattaatgcatacagtaatgcatcgttgttattttttatttatttactatttattatgtaccaaatcagcctttcagtaaaataggtcaaattactgattttctaaatataaaatgcctcctaataacatactattagtacatcattaagaggctcttgtgttatttgcatactaagcgctcaaatttaaatttaagatgaagattcttgcaataatatttctatatttgtcgatatatccaatggatcttccattggcaagaatcgatttacaacatttccttgtcgatcgattataaattttgtgaaattccattttattggggacccaaagattcctggttgttcattctttaaatgcgtaaataacggatgttcatcgttcccgttcacagatattttagctaacactggaaatgttacaccaaatttctcacgactaattttcaagatttcttcattagaacctggttgtcgattgtcaaaattattattcggaaaactcaacactacaaacccacgatccttatatttttgaaataaagtctctagttttttcaattgttcgctatatatacattctgttgcagtattaacaactaaaatcactttacctctaaatgcttctaatttataagttaagcctttataatcacttacttcgatatcatacacatttctattattcataagacacccctacacagccttttttatattgaatatgttctttttagaatgttctgataaaataagtgcgcgtttacaccgtgaacacacattatatagcgtgatacatttttcgagcacacgataaataatgttcgagtttatgttgttgctcaacctatccgatttaccgtcttttttcacctgtcttactttattaaaataatcacattgtatagctgtattagtccagctacaatatcttccgttataacccctcattataatcatccttattttctatttttaaaaagacaattagaccgctctttaaactatagattaatacttaagttaaactcatacatactgataccatacgttagatctaacaatttaaaattcgttataactatggattaaagagctgcccaactcatataatccttaaaaacttcacatgtgattgtttattaagccctcctttatcttattaaatatccttataacccttttaaaattaaactgacacactcatacattgttacacgcgacgataaacgtcatattattgcatatcattaaaacaagtcactttgtatcgtgtgcgaccgaatacatattaaatcatcaataatgattattcaattattaaaaataaaaacgaacattctatatagagtttctacttattgttttttcagcattgtctacattacttaacattcgtgtttgtaagtaatattgaccgccaatatttagacactttataagtatgccattcatcatttttaatcatattatttttcttattgatatttctattcatatatttctgattgtatatttagatataataatttgttattggaaaatatatgaaacaaatttgactcatctttttcaatatctaaatgacacgatgcatgattttttaattttgtaattaacttccttttaaattagactgaattgtgacaattttcaaacattttaatgtgtaaatcattggcaaaatatacgaattgcatttaaatcgtcaatttacatatatttttgcgtagtaatcaatcgttatcattgttatttatcgttacattatttcgagtatcagtatgtatttcgggcttcgtttgataacgacatttctttgtgacatcgcttcatcagtgtaacaacaaatacaatgatttcgtgatgttagttacccattttatgtgttgcataaaatatgttgttataaaacattttaaatcattttatataaacaatctatatatttttggcatttccaaaatatcacttgttatattaaaaaccgacaagacattttatcttatcggttgaaatttgttattgttatttgtaatgtttttaggtttctttttaatataatatatttcagtgaaaatacatgattgattgtgatttcactgaaacatggttaattgcgttgttgatgaataactttagcataaatataggaagttattttgtacatcgccatatatagaaacgaaattataatgacagctagtacgtaacttgttaaaaatatatgatggttattaatacctatcatatttagtaacgtatatacaatgttactagaaattaatgtgtgaatcagtgctactgttattggtattgcgaacaagaaagtcatttgatttcgtgttatctttgctattcttccattatctaaaccaagttttttcataatgtcataattgtgctgatttgcataggcttctgagacttgtttataatacatcattagaaatattccaatgacaagtacaattgatactacgccacctacaaatattagtccacctgtcaaacgatcccaaaccattagcatttctgatttagaatttattgacgcatcgtattttttcgatagcttttgtatttgtgatgttgttaatttcgtctttccaaatacattaaagtttatcgatattgtcgaattcttttgttcatgtgcataaaatccttttactttttgtaattgattgttatctttaacaattaaaaccatactatcttgaatcatcatcaaatttaacgcatgtgcgtcaagttgtttcactttaaagacttcattattaagaccgaccttagactgctttttaaaaataggtacattcgtaatcatacctatactttgattgtctaagtgtaatttgttttggtgatatcgattataatcttgtgcagtaaaagctgtaatcattactgattgtcttgaaaatatcgcgccttcattaccaatgaagtctattggaatatcatcactagcctgttttaacttgtaataagcacgattcttttctaaagaagctctaaataatgtcgtttcatatactttgaagtcttttgcattaaccgaaccctgtatatcacgtttaatattctcaattgtttgttgacgttctatttgtgacttagaattgtcgctaaatgacaaatcataatcattcgtaatcaatttcgtaatggtatgattcatatcacgataggttgttaatgtcattgtgagcgttacaatcaaaaatgtacacagcaaagtgattgttgcaagactgactgcattcattttaagacgtacacgcatcccaactaccacaaaaaaataccgtggatgatagtaaacttttgatacctgctgcaatatactaataattatttcacttatacctacaaaaaatgcataagtaccgataataactaatcctatgacaatccatattttaaaaaaggcaccaaacgtcgtatcttgttgtaatgcaataaagtaacctaaatatagtgctgcgcttcctataacaattaaaacgtaacgcaaccatcgtgatatgacactagaatcggaacgatgttgataagttatcggccgttgaaaattaatactaaacaagttgaatataagtagcatgcccattaatacagcaatgataatcaaagtaataaacatcgctacagagtcaaatggataataccttaacgtcgcaacttcactgcccattattttctgtataaacaagaaaaatatcgcaccaagtaagtatccgccggcaatactaacgactgaaattatcacaaattgtaagatagtttccatcactacaattaaacgcatacttttcttggtcatgcccaatgtcataaaaatgctaaactcttttcgtctttgtgacatcataaagtgatttgcatagaaaataaaaataaaagttaaaagcgccataaaaaaattagctatgataataaatggtactaggaagtcattcttctgttttatgtagctatttaacccaattgacacaagcgtatattcaatcatgaatagtacacttaccgctaaaatgaatggaatgattacaagtcgctgcgtaataaattgacgtcgcactatgtgccataacaatcttaacttcatatattgacacttcctccattcacaagtgctaagctatctgttattcgttgttgaaaagctaattgactttcttcaccacgatatatttcatgatatagacgcccatctttaataaaaatgactcgctctgcataagacgcatcgatatttgaatgagttaccattaaaattgtctgttccaattgatgaatctcttgaaataacatcatcaatgcctttgatgtttttgaatcaagtgcacctgtaggttcatcggctagtaaaatcgtcggcttagtaactaatgcacgtgcaatggcaatgcgttgcttctgacccccagagatttcagaaggatacttgtttaagaatccctctaaatgtaattgtactgccaactgatgtaccctttgttctatatcttttcgtttagcaccagctaaaattaatggcatcattatattttctttattcgtcattgttggtaaaagattaaaatcttgaaaaacaaaacctaccatttgttgacgatacaatgctttacttttatttttcatattatttaaatgtgcgccatccacaataatgtcaccttcagttagtccatcaaaagaagcaattaaatttagtagtgtagacttccctgacccagactcacccataattgcaacaaattcaccagctccaactgataaattcatttgattaagtgctgtcgtagcattcaaacctttaccataaaccttttttacatgtttcacttctagcaacatggcatgcacctcatttctttgttagttctatattaaaacaaaaaaatactaataacatttaaattagtaaaaaaatgttactagtatacttacaatattgaaagtttttattcatctggaaattgaatcgtaaatgttgtaccctcattttgtttagatacgactgaaacaggatggtttgtgtgtgttgaaatttgttttacgataaataaaccaatcccacttgagttactttggcgctggccattataacctgaatagcccttatcaaatattttaggcaagtccgcttcactaataccgataccattatcttttacgtgtaattgattggattgctcatcaaattcaatccatatatctttacctctcgcatacttaagtgcattatttattaattgttctatcattaaagaggtccatctaacgtcagttaatacttcgtgatgacaaggttcataatggatttttgttttttgatcaataaactgtattgaatatttcataataattgggcgaatgatattattaatcgaaattttagtgacagaaatatcagaagtttcatttaataactttaaataactaagtgctaaacttgtatagttatcaatttgaataacctcttgacgaacacgattaacaacattaggctcatctctttcaagtaacagttgtgctgcagtaatgggtgttttcatttgatgtacccatgttaaaaagtatctctctacatcatttttatattcaatttgttcatttttaagctgatacaacgcattttctaagttttcaatttgttgttgttggcttatagtttttacaaaacttaaatatttaatacctatgaatatgagtaataataataaaataacgccaagtgctagtaaatatgcttctaatggcaaatgatacaggtaaaacattaagccaaacaaagcaaaaataactatgactattgctatttcctgagtaatacttttaagaaaggtcattgcattcaccctatactttatatccgacatttttctttgtaatgataaaatcattaacgccaatagtatttaattttttacgcaggcgcgtcatgttaacagctaatgtgttatcatctatgaagttttctgattcccaacatttttcaattaaagcagttctacttacatatttatcttcattttgaaataataactttaatatttgtaattcagtcaaagatagctgtatgttttgttcttgatacacgacttttgcttcatctaatattaatgtacaacctttaaccgtcaatgaatcattagctactgacaagtcataagttcgtctcaataatgcttgaattttggcaatcgttaatgacaagttaaatggcttttcgataaaatcatctccccccatttgtattgccataatttggtccatattatcaatacgggaactaataaatataattggcacattagatgtttttcggatttcttgacaccaatgaaaaccatttaacgttggcaaattaatatctagcaatacaagctgaggttgattttggttaaagatagacagtatatcatcaaattgttcaacgacaataacaccgtaattccattttttaagttcagatgctaaactctctgctataacaaaatcatcttcaacaattaatattttcatctataatcttcttccttcaattgaattatcctttgttatctttttgttctttatcctgctgcaatgacggctcttgatttgaactttccgtgtcatttgtattttgatttagtgtatttgctttttctttctcgagttgctttttcttcgtacgtttacgctcttctaaaatagacaacactataaagaatatgattaataatggagataacattactagtatcatttttccacctcaaattatatttaattctatattttcacacgcttctattctaacgctttctataacaaattgtcatatatattcattttttgttattctaaatcactctgtttacatatttttaactaaaactacataattgctcaaaattcctcttttacactgaagacatagtcatatactcaggaggatgtcttatgttatcagttaaaaaagccacaaaatttgcagttgctaaccttattatcgtgtcaacggtttttagttctgtcacacctgcaattgcgcaatccgataaaagttctaaagatgaaagtttcgcggttggtaatactaaaaatccaaaaaatgttatctttttagttggcgatggcatgggtccatcatttaacacagcttatcgttattataaaaatgatccgcatgctaaagaaatgacccctactgcttttgattcatatttaaaaggcacaaatcgtacatattcaaatgacccaaaacagaatattactgattctgcagctggcggaacagcctttagttctggtcataagacatataatggtgccatcggtgttgacagtaacaagcagaaagtaaagacggtgcttgaacgtgcaaaagaaaaaggtaagtcgactggtcttgtttcaacagctgaattaacagatgcaacaccagcagcatatgctgcacacgtgacttctagagatgataaaaacgaaatcgctaaacaattttataaagataaaatcaacggaaagcataaagttgatgttttattaggcggcggcgctaaatatttcggtaaaagtaatggcaatttagataaaaaattcaaaaaagatggttacgaccttgccacgaacagtaaggagttatcaaaatctgataaagataaagttcttggtttgtttgcagataaaaatatgccacttgcaatagatgcttctaaagacgaaccatcattagctgatatgcaacaaagtgcacttagtaagcttgagcgcaataaaaaaggattctttttaatggtcgaaggtgcttctatagataaatcagcgcattccaacgatattacaggcgttatgtctgaaatggaaggttttgaaaaagcattcgatgacgccattcaatatgctaagaaacataaagatacacttgtcgttgcaacagcagatcactctactggtggtctaacaattggtaaagataaaggatacgaatggaatcctcaaccgattaaatctatgaaacactctggatcatatatgacagaaaaaatggctaaaggtgaagaccctgaaaaagttattaatgaaggttatggatttgaattttcacaagatgatatgaaaaaggttaaaaaagagaataaaaagctaaaaagactacttaaaaaagaaaaagacgaaaaatccgcagaagtagaaacgcaaacaaaagccctacaacacgctattcagaagccagtaaatgataaatcttatacagggtggacttccgatggacatacaggcgaggatgttaatacctacgcttacggacctagatcagaatcatttagtggtaatatcgaaaatacagaaagcgcaaaaataatatttgatatattcaagtaaagcataaaaaaattcccgagcactataacaaggtgttcgggaattttttatggtttaatttagtactcaatgttaggtgcttggttaacacgttcttggtattttttaaatgcgaagtataaaccgccaactaatgttaaaataactgctaattttttcatcattcaaactcctttctaagatgtgttgaaactgagttcaattaaattatatgtttttattatacactttttgacatattttttaaatttaagaatgcgaagatttttaacatttctgatgctagctttctttttcatctttcaaatgcttaataaaatcaaagccaggtcgccctttagccaatgcttccatcacatcataccaatccgaaccgacttgttgatatatattttgcaataattcatcttgcgccttgttcaattcagcaatgagttgatcgcctttatccgtcgaatataattttttgacacgtcgatcagtctctaaaactttttcaataatgagaccttgctcttttaatttttgaagtgttgcatgtgatccttgtttagaaatttctaatatttctagtaatgatttaatagtaataccaggtaatttattgataaaaaacaaaaaacgatgatgctgacgactcataccatacttctctataatttcatcagcggtagtaataaaggttttatatgcaaaataaaacaacatatgctcataatcgtttttattggtcgacatgatgatgactcctttcaaagcgttaacctcattataataaaatttataatgtaagtcatacaaatgatgataaaactataagctaaatctaagtttcacgagaaacatttttgtgtatcagcaaattgcgccaatcatattaatacaaaaataatttaaacacttagaaatgttagtcgtgcgtaaatagtttgtatctctcactctgtgtatttaatgcagccacatattttccaagaaataattaatcattcaccatccatgttatagcacgcttaatcgcttgatcccaatatgcataatcatgatctcctggtccatcttcaaattgataaggaacatttatgcgtgataaataatcgataaaatctaagttgtcttgatataaaaagtcttgtttaccacacataatgagcaattttggaatttgtttatcttcagctacagctttgtctagcaagtaatacggatcatgttcagttcctttaacacttgaaagattgccaattatggcctcttttgaaaaatcattccactctagatccattaaattttgcgcttcaaacacagcagataatggtacagctttggcaaatttatccccttgtgttaatgcaaatttaattgtgccatatcctcccatagagtgacctgctataaaattgtcatcacgctttttggaaagtggaaatatttgatgaacataatcatacacttccaaaatataatcataatagctatgaccatatgccatgttagcatatgcgctatgatccacattgggcataatcacagctaatttgtgttcattcgcatacctttctatgcttgtatatctcatatatgtcgtttcatcacttgataatccatgtaacaacattaaagtttttaatggtttaacagttgtatcgctattaaagaagctttgatcttccggtaaaatgactgtcaaattttgatgcataccaattgttggtgaatgatagtttaatgaaatataagccatacgtcatgacccctttctaattctactttatcaacattttacgcttaatcaattcactttaaaatcattttcaacaaaaaaaccgaatacaaatgtattcggcctaaaaaagtatttacgctttttctttatgatcttgcttgcgttttctaaacaatagtaatgatcctaataatgccatcattgcaccaaataaagttgcatttgtgttttcgctcttatctcctgtttctggtaaagcatcagttttgtgttgttttgataccttattagaatggtttacttcacctttaggatttgatggtgctttctgttcattatttggtggtgtaactcttgaatcggagtcactatctgagtctgagtcgctatctgaatccgagtcgctatccgagtctgagtcgctatctgagtctgaatcgctgtctgagtctgagtcgctatccgagtctgagtcgctgtctgaatctgaatcactgtctgaatccgaatcgctatctgaatctgaatcgctatccgagtctgagtcgctgtctgaatctgaatcgctgtctgagtccgaatcgctatctgaatctgagtcgctgtctgagtctgaatcgctatctgaatctgagtcgctatctgagtctgagtcgctgtctgagtctgagtcgctgtctgagtctgaatcgctatctgaatctgagtcgctgtctgagtctgagtcgctgtctgaatctgagtcgctgtctgaatctgaatcgctgtctgagtctgaatcgctatctgagtctgaatcgctatctgagtctgaatcactgtctgagtccggagtcactgtctgaatctgactcactatctgattctgagtcgctatctgattctgagtcgctgtctgaatctgaatcactgtctgaatccgaatcgctatctgaatctgaatcgctatctgaatctgaatcgctatctgaatctgagtcgctatctgattctgaatcgctatctgattctgagtcgctgtctgaatctgaatcactgtctgaatccgaatcgctatctgattctgagtcgctatctgaacctgagtcgctgtctgagcctgagtcactgtctgaatccgaatccggatccgggtctgggcttggttccggttctgggtctggacttggttctggatctggcgttggttctggttactggttctgggtctggacttggttctgggtcaaccggcggccctggagttgggtctttcggatttactgctgaatcaccatcagcacttccaccaccataacgtacaacattctcattattccaaccgaaaatactgtagtctctatttgttacaggatcaacattttcttgaataacctgagtttttaagttcttacctgtattgtcgtaatgcccttctactaatactacatatgttttagtaatatcaccaaatttaatactagctacatttggatgctcataatagattctatttttaaattggtctgttacttctttaaggttagagtcatttggatctgcatagtagctatctgataatttagatgtatcattcacttcaaaaattctcagttttgtatctgtagcacttactttaccgctactttcttcgattttatcttggtagcctttaatatacacccacgtattacctaaaactcgttgcttagggttaacaaatactgtttgcttgtatgtgttttgacctgaagctgtatctacaccaataatttgagaagaaatgttcgcgccatttggtttatcaattcctgcaattggcgaactatagttataagtaattttattattaaacatttcatccgcaatattaatattcgcatcatatgttcctgatttaggtgcctttgctcggtctgtaaataaaggtaatgaaaattgtccgttaatattttctttattatttacataatctgtaaagacaaatgtatacgtcttagtcaagatatcatatgttgctttagctacaacatcgccattcgtacttttaatgtctgcaattggcatcgtattatttgaattagaataatccacgtctccattaccagttaaactatctggtaacttcgctgtaaaataatcccctgatttcactttatctgtcactgtaaaatttgccgccataaatgtgttaccactttgattagggtcaaatgtagtcttttctaacttgaaattacttgccgtaactttatcatttacatttgtacctttagcatcagcagcatttactaccggttcagcaacagctaaactacgtacagctctcgttctaacacttggtttactagttccttgcgcattggaaatcgtttgtggtgatgattgtggtaaatctaatgtttgagaatttttaagctcactgtttgttgctatgctattagcatcattcgttgttttattatctacttgagaatttgcttcttgaggaacagtttgatcttgcatttttgcagcagttgcttgatttttaattgccgtcggttgaggtgtttcatttgttgaagctggctctgttgtagtggtattgctcgtttgtgtagacattggttttgttgtgctatctacattcgcactgtttgtgtttgcactaatatcagatgtatcattagccgttgtatttaattgaggtgtttctatcatattgtttttttcggaatctgcacttgcattatttttcgaagattgcgttgtatcgttcgattgttctgaagcttgtgcttgatgattgcctatcccaaatagtatagttgcccctactattactgatgtggtacctactgtaaaacgtctaatcgaatacttattctgcttattcgacaaataatcaattctttttttcaaaaatattactccatttcaatttctagattagtctaaattgtataatgaaataagaattatatcaattgcttttcgaaaaaaattacgtaaaatttgttttcttcctatttatataacttaaaattttctgttaactagcaaaaatcaatatactatttttacactattacaaattttttacttttcaaaaacttagaagttctaaatttttcatcaccttaaattttactgtaatttcaacaatcaaatttaactaacattttaaattattcatcatgctagcaaaaaaggcctaacgtataaatgtacgttagacctcatgttcaacttattcattttacattgtatattaaacacatacatcattgaataaatgtttgcttactaaccaatttttatgatctttaacaacaagtttttcatctttaagttcatgaataatatgaccagctgtttcccgggaaatcccagccatatcactcatgagttgaatagttaaaaactgtttgatttcataaaattcatcttgatcgtatcctactgtctgacatagatggcatatcaatttgataattcgatctttagcaaatttacttgttaatgccatgttatagttcatgtgttgctgctcattatcatttattaatgcaaaaagtgtcaaaaatatatcatcattagctttgcacaaaaaggccatcaattctctaggcaatccaagaactgtacaatcggttaatgctgtacacaattcgttaacctctttcggatgaaataagttactgattggaaataatacttgctctttattaaaataacgatatacatctccattttgattgtaatgttctctaataatgttaccttcaattaaaaagtaaatattgctactttcttgtggcgaaaaataaataacttggcctttcgtataatgtctgacaaaacattcactttgatatggttgtaatatactatatggtatattaatgtaatctgctaatgcctttagttcatgttctaatttattatttctacccaaaataaagttttctgtcataagttaaactccttcaaaccttgcaaagtgtcagcagacaactttttcatttgaatcaacggagaaacatatttaatgttttgtcgcgtgataaagtgctacatgtgaatgtgtgtacctttattaccaatcaaagcttcgtatgcctgctctaaattggtaatgataacttttttgttttccccactttcaacaaatcgtatcgcagcttctatttttggcaacatcgatccttccacaaacttaccttgtgccgcgtattttttcagtgttgctacatcaatatcatcgatttgttgttgattaggttcattaaagttaataaatacattttctacattcgtaagaatcattaaggtatctgcttcaatcagcgttgctaatttctcactagcaaaatctttatctataaccgcttcaacaccttcataggtattttctttttttataactggaataccgccaccaccgcatgcaatgacaatatttttaccgtctgctaaagttcgaattaactggtgttctagtatagattgaggtagtggtgacgcaactacttttctataaccacgtcctgcatcttctttaaagactgagtctggctgttctttttgtaattcttcaacttcttctttcgtataaaaaggaccaattggtttagttgggttatcaaatcgtggatcatctttatctacttccacacgtgtaacgattgtgcctacagttctatcactattcatttcagttaaaatgcgattgatttcagtttccaaccaatagcctatcataccctgtgacattgcaccacaagtatccaatggcattgccggcgttgtgtcactgttcgatttagcttgttggattaataaacttccaatttgtggaccattaccatgtgaaatgacaatacgcgctggtgaatcaaataaaggtttaaggttttgcatcgcacatctaatagctgtttgttgtgcttcagctgttgcttctgttgtctgtatcgcattaccgcctaatgcaatgacaattttctctttcatatttttgtcgctccttttaaaaaacatttatcgttcccatcaataacttaattaacccgataactgcaagtacgataataatcataaaaagaatatagtctgatttaatcaaacgtgtctgattattcttttgaacgattgtataaacaagaagagctggaatataaagtaacatcgtcaataataagtaattgatacctgctgcatatataagccatatagcataaattgaggctatgataccaatcgtccattgtttagtagttgcttgctgtcgatgctctaaagtgtatttaacttggtaaaatgcactgaacatgtaagggtataaaatagcacttgatgctagtgaaaatgcaaattgatacgcactctgtgtaaatagcatacttattaaaaataattgtactaatatattggtaataagcagtgcatttacaggtgctccatttttattttctttagcaaaccattttggaaataatccatcttttgcaacaatgaaaggtaattcaccagcaagcagtgtccatcctaaccatgcacctagtaccgaaataattaaaccaatatttacaagtgtagatccccaaccacctacaatagttgcaagcacctgtgccatacttggcgaatctaattgcgaaatatgattttgcaaaatcacgccttgagctaatacagttaataagaaatagataattaaaactgatataagtcctataaccgtggcactacctacatcttttttatttttagctctactagaaaaaattactgcaccttcgataccgataaacacccaaactgtcactagcatcgtacttttaacttggctcattgtgctcgcccaactaaatggcaatacaccctctgacgtcatactgaaaaagcctgttttaaaagtgtcaaaattgaatgcaattatcatgcatatgattacaagtaaaatcggtattaactttgcaacagtaacaatactattgataaatgctgctgtttcaacgccttttaaaatcaagaaatggacaccccagagtagtaacgaggcgacaataacacttggtaatgtgttgcctcctttaaaaatcgggaaaaagttacctactgctgacatcaatagtgttgcataggcaacattgcctaaaaacgctgagaaccaatatccccaagcactgataaatcctacaaaatcgccaaatcctgcttgagcataactataaataccaccgtctagctccggccgttcattggttaaattttgaaatacgaacgctaatgaaatcattcctatagctgtaataatccaaccaataataatggctaatccaccggctttaccgcccatatcagacattatattgaacgcaccgccaccaatcatggatcctataactagtccaattaaagaagatttactgagtttgttatctcctgattcgttcatattcatttctcctttaataccaatatgaggtgtctgtacatgacacttatatcatcagacacatcatattcatatcgttccatttagtgattaactccccaatgttgctgccattactgccttaattgtatgcattctattttcagcttgatcaaacacttttgaatgttcacttctaaagatttggtctgtaacttccatttcagctaatccatatttttcataaatttcttgtccataaagtgtatttgtatcatggaatgctggtaaacaatgtaagaatatcgttgaatctttacctgttaaatcaaacatctgttgattcacttgatagtcttttaataaattaatacgttgttcaaattcactttcttcacccatcgatacccaaacatctgtatatatagcatctgtattttcaactgcttctgcaatattatccgtaatcatgactgaaccaccatattgactcgctttttcttttgcaatatcaacatatgcctcttttggatttaatgatttaggtgtacaaattcttacattaacacctaacatagcacctgctaccattaatgaatgcgcaatattattacgtccatctccaacgtaagttaagtttattccttctagatatccaaaattctcttttattgtcataaaatcagctaacatttgtgtaggatgccaatcgtctgttaatccattccacaccggtacaccagagaacttcgctaaatcttcaacagcttgttgtgaaaaaccacggaattcaataccatcgaacattctacctaatactttcgcagtatcctctacagattcttttttgcctaattgaatatcattttttcctaaaaattctggatgcgcacctaaatcaatagacgcaactgtaaacgcagcacgcgttctcgtcgaattcttttcgaatagtagtgcaatattttttccagataagtagtgatgcttaataccgtttttcttatactcttttaatgtaattgcaaaatcaataagtccttcgaattctgctttggtaaaatcactttcttttaataatgatctgccttttaaatcatacggtttttgaatttctgtcattattttcaccctcgtttctataatttattacgttaaatgtcttctctgaataatggttgactcatacatctagggcccccacgtccacgtaccaactcgctaccagatatttcaatgactttaatgcctttttgtctcaataaatcattcgatacatagtttctatcgtaagtcactacaacgcctggtcttatacataatgtatttgagccatcattccattgctctctagcaccatcaatgacatcaccatttcctgttggaatgaattggatatcatctatacctagtacgtcttctaaagtatcttttaaatgactagattgtttgatggcaatatctttatttacgtcatcatattcaataataaatatattcatattgccttctgcctttaaaatggctgaatgcattgtaaatttgtcataatctatcattgtaaatactgtatctaagtgcataaaagttcgactagttggaatttcaattgctactacttttttaaacgtcgcctgcggattttcaaaaatacgtcgcgctaacttttcaatagcttgtgcagatgtacgttctgaaacgcctatagccaagacatctttagataaaacaagttcatcgccgccttcaatattgaatgggcaatctcgatctaaccagattggaatattcgcatctttaaatctaggatgatgctttacaatatattgaataaatattgattctcgtcgtcgtgctctccagaacatccgattgattgttataccgtgtcctattgaggcttgtggatctctagtaaaataaaggtttggcattggatctaaatagaatggatacttatcatccatatactctactagatgtgtacatttcggattaatttcttccttacgtacccctgacattattttatctacaagttcttgattagaaagtgtcgcaaataatgccttaatttcttcttcatgacctaatattgtttttttagactctgctaatacatcatcaataaattcacttcttacttgaggattttcaatactttcagctgctaacttctcaaggtaaagtacttcaacaccctcttctcttagcacctgcgcaaaatggtcatgctctttttgagctacttctaaatatggaatatcatcaaatagtaatccatctaaataatcaggtactaaattttctaattcttttccaggacgcttaagtaacacagtttttaaagctccaatttcgctatttactttaattggaccatctgtcatgtctatttcctccttttatctttgaattcatttagagtatagacaatcttcaaacgcttacatgtgattatattcacataaagaaagtcgaaaatttcatatctttttgttatacaatacataataatggatttttatacataaataaaggtattttgggtcaaaatatacattttttattcaaaaatacccataaaaacatgttgtataaagttttttatacagtcaattgaatgactatgaattctttctttccataaaaaaacgcgtacacaagttaatatttggtaactaacttgagtacacgtgatacgaaacaaatttttattattcatttgatacatgtctatttaaataattttgcatatacgtattctgccatatcatttgaggcagttaagattaatgtagtgtcatttccactcaccgtacctaatatctcttctatatttagctgatcgataaaatagtttatgccttgggcgaaaccaggtgaggttttgacgataatgtatgaaccattgatgattgaacttagaacttcatgttcacaatagtgtctaaacttttctctcatctcttgttctgtttgattattaatagctttataaatccatgtctcacaatcgatagggacacgatatatatttagttccttcaagtctttagcaattgttgttgcactatatcttacaccaaaatattcttcaatatatgaaatgatttgttcttttttataaatcttatgctttttaactattgtagaaacaatttctaatcgtttacttttcttcatattgtaaactcctttggtagttacgtttcttgtattaaaaaataaattcatgcatgtttcatttataatttaacactttgttttgcaaaagataataaaaatacatgtaaattttttgtgacaacttttaaaatgaattttgtattctaagtcagcatttaattatcacatatctactacttgtaatgattttagactgccgagtagtctttcggcagacaaccctcacactcctctcatctaattacaaagagagggtatacctacaaagtcaattatcaatgtaggtataccccatatataagctgtatttaaaatttaattatttataagtgtttaacattacttcttcttgtttatatatttttactccacgcctacttcattccatgcttcatacacctgttcagctgtttgctcgtcatataaatctttagccgcttggtataatgcatctttacaatctttgaagtttgaattacttgttaagtattccgttaatgctcggtagtaaatttgttctgatttagatttccctattgcttgaatcacgttataagctgctttatttggaattccagaattcgtatgtacgccaccattatctttttcagtgaatacatagtctttcatatgagctggttgaccaaattgttctgggtttgacatgctgcgtaaagcgtctccctcttttccaggtgtgtagacatcttcacccattaagaaatcctcgtcatctacaaagtatccaaaaacatctgaaaagctttcatttagagcgcctgactggtccttatattctaagttcgctgtctcttgtgtcacaccgtgtgttaattcgtgtgctactacgtcatttgcacccgataaacttgtgaatgtgcgaccatcaccatcaccatagatcattttgtcaccgatccatgcggcattatttctgttatcttgaccaccgtagttattaacatgcgttaatgaaacaattggactaccttggttgtcatatgattcacgaccaaatgtgtctttgtaataatcatatgtttgtttagcgtaataatttgcatctacgccagcacgttgctcatcttttacgaagttttcatcttcattagtaatcaatgttgcttgacctgtttgatcattaaagctaaatgctgataatttaccttgatgcgttaaatcttctaggctaaatccaccgtcaatactattgatattgatatcttttgtatcgccaagtacaccttttcctttaccagtttctgcagcttctttaactaagttcattttttctaaaatttcgccagtttgagcatcaattttaactttccaatgtgaaatttctggtgtcactgtaattaactcaacattataaacgtatttattactgtcaccatcgatttcaactttgttttctttaatgactttatctttaagatttttcgctttattcttatcaatcttaactgctttaaatgctttgtcggctgcgtcatctttacttaatgtcactttattcgttggctttactttcttcgcatcagtatccccattgattaaaacgacttttcctgatttgtctgcgtgtactttcacttctttgtcaggtgcatgaacaccatcaacactcggttgcaatgtataatgcgtaaatccttttttatcagtttttacatcagtaacagcgtaatcttgataaatattttttacattttcggatttaggcaattcttttaatgctttgaccgcatcactcttttgagtcacctcaaatttaatatcagaattagctggtttattttttgaatcaatcgctaatgctgctggtgataaagtgctcaacaaggttaatgctgccatacttgtaaatgcatatcttgaaaatttcctcacatttcattcctcctgaaatcttaaaaacagcttataaataaaatattaatttaatttttcagaaaagtaaatgattatttctatttatttctatactttttgttcgttgattttatttattgattcttttcttttttaaaaatgttatctgtagctaaataaaattttaaaaattgagcttaattatattttaaaatttatcaaggctttatttttgtgaaaatattaacaaatacaaaatagtgctctatatacttaatcaatgcttgaaatatgtgagataactatttaaataatcataatcaaataaacatttttatcaatttcaaacaactatgtaagacgcaataatcgttattatttaataaaaaagactagaatgcggtatcactcctcacactctagccttaatatgccattattttatttacttgttttgtatggtgtatgtccaactgttacttcgacaactctattatgatcaacgacaaaccagatgcctaatgtctttttagcattttgatagtaaaaaataccgctatcagcttcctttgttttaccattttcttttttcaagtccttgccataagctttttggatatcttttaatgaaatattatttttaactacaaattgcaattgacttgcttcgtttccttttgcagaaacacctttaaaagtttgatcatatttctctactttttttatcgtattcgttttagctaatttaataccattgaatttcacattatcatacttaatcgcgttaataaaattcttatccagaataaaattagcattattaccaatataaccattataagtataatatggggttattgctgcctgtgcctgtttacttgttggcgccgaattttcaacaactgttactccaatcagtgtgcccaatgctaatgttgctgctacacaaactttactggttttattcataattatctctcttttccatacaaatattttattccttacacttttattataactttttcagccataaaaatactaatgattatatttataaatacataacagttttgttatactaattgaagtacacaaaaaacaatgaaaatattaatatcgcctacttttctaatatttattttttaaaatgattatggcaatattgaaataaattatttagcttcacgtatcaactacttttcattaacatggaggcgttatatttgaaaaaacttcttattaccatcgtaattatcgtattaatcggagcacttgggttcgcaatttatgctgcaataaatcattctacatcatcaagtaataaccaagaacaagaaaataaatctacgcataaaaagacagaaaccgaagaaaatgatcaacaagatgatagtgcagacaaaacagataaaaatcaaaataatggcaataacgttactaatgacaatcaaccatcttcaccgtcaaatgttcctaacaaccattcaacagtaccatcgaatacgcaaccagctcagccaaaagactcaaattcaaataaaaataatactcacggtggtggcagtcaatcgtcaacaaacaaccaaaataatcaacaacagaacacaccacctgctaataaatcaaataataccaatacgccttctaaacaaacacctcaagcacaatcacctaaaaattaatcatttgcctgatacgtccacaagtaccagatgcataaattcagaaaaacagcagtgagatatttttctatttgaaatatcttactgctgttctttatttgcataattcgcactctgttaaaatcatataaaagttcgctttaatgtcattgacgtatgtataagctctcatgtttaataatattaatacacccttaaaaacgcttacacgaaaaatttagaaaggaggtacatgttaaatgcttgatagacacttaaaactactccagttttttattaaaaatccatcaaagcacattagttctaatgaaattgctaaacatgtcaatgtttcaaaccgcacagttcgcaatgatatccatgttatcaatagcaattttatggatgatatcatcgtaagtattaaatctaaaggatatcaattaaatacatctcagtataccttagaaacgataactgaacgttacacgcatattcaatcatataaagaaaaactattattatctatggcgtatcaactgctaatgcacaataaatcgcagacattgcaacaactagagcaagattatctattatctaaaactgtgctcaacgactatttcgttcgaattcaacaatggtgtcaaaaatttaatatcgctttaacaatcaagaaaaaacaaggtattgtggtcgatggaacagataatgatatcactaatgccatcatccatttaaatcaattatcatcagggcatgtacatgttgaagacctaattttaaatgaattacctgattcacaccaaaggatgatttcgcatattatacaagagacacttcaacaacatagtattgaaacaactgatattcaaatacaacagcttttaattcatctcattttaatcattaaacgtaagcaatctttaagtgagctagacacgttaaaccacgattcaaaattgatatctcaatcttgcattaagcaaatcaacgaaagattaggttatgacttgaacgaaaaagtaatcaatatgttttcattctttattgcttatcattttaataaactcgatattggcatagaacgtatatttatacaaagttatattgatcgcttaatcgaattgatgcagcaacgtattcatgtacctttcaatgaagattcgattttacaacaaaatttatataatcattttagtaaagcatatttacgtatcactcaaaacatttatttaaacaatcctttagttatagagattaaaaaactctatccctttgtgtttaacacactttttgaagcgattgataaattagcaattgatactgatatagagatgagcgaagatgaaattgcatttttaacaattcattttcaagctgccatcgagcgtcgtaccaaaacacaattaaatgtagtcattgcttgttattatggtctaggtgtgtcgaattttttagaaactaaaataaataacttatccgaagagttgtcagtgataaatacgattaaactagaaaatataacacactatcactttgacaatgtagatttattaataacgacccatgatattcctaaacaaacgctaaacatacttcctaagcacctgacgactatcaaggttgcaccattattttctgaagatgatcgtcacaaaatcagacacgttgtgaagcaaaagcaaaatccggttcaagcacatcatcatatggacactgtcaatttccttgtcgtaaatactgaacaaaaatcacggcatactgtgcaaatttttgaagaagctcaaaaaatattacaagcacatcatgcgattgtagaaggatatatcgaatcagctttagagcgtgagaaatcatcttctacatacataggtaattttatggcgattcctcatggagatcctgaaaaagttttacaatcacatgtgcttatttttcgcacaaaagatgtttttccttggcgacaacacgatgtcaaacttgtctttttcttagcgatttcgcataaagacaaagcttttacaaaacaaatgatgcaattaattgctaacttggatgatgattcagtgaaccatttatgtagtttagatgatcatagtttaaagcaacagttatttgaatacttacaagaataattgccactagtaacggtaattattcttttttttagtatcgagaatacgcttacaatatagaaaaggagatgattttatgaaaattgtagctattacctcatgcccaaatggcattgcacatacatatatggctcaagaaaagcttgagcaggtagcaaaagaaatgggtgtggatattaaagtagagacacagggcggtgttggtgctgaaaatgttttaactacgcaagacatcgaagaagctgacggtgtcataattgcagctgataaacaagttgatctgtcccgatttgttggtaaacggttgattaatgaaaatgttcgcgaagggattcataatccgagaggtctaattcaacgtatcattaatcaagatgcgcctatttatcaatctgaaacaaattatcattcgaaagatcgcggtaagtctaaaagtggtattcaaatggtgtatcaacatttaatgaacggtgtatcgtttatggttccttttatcgtagttggtggactccttatcgccatcgcgctgactctaggcggtgaaacgacatcaaaaggattagtcatcccagatgattcattttggaaatccattgaaaacattggtagtttagcctttaaatttatggttccaatactagctggatatatcgctgttagtatcgctgacaagcccggtcttgttcctggtatgattggcggcgctatcgctgctgacggtagtttttatggcagtgatgcaggcgcaggatttttaggtggtattgttgctggtttcttagcaggttatatcgcaaagtggattaaagatattaaagttccaaaagcaatggcaccaattatgcctatcattattattcccattatttcatcggtcgttgtaggattgatatttatatttttaatcggtgcaccaatttctaatatttttgaggcattaacaacctggttaaaaagtatgcaaggtgctaatattattatacttgcgatgattataggtgcgatgattgccttcgatatgggcggtccagtaaacaaggtagcatttttatttggctcagcacttattgctgaaggtaattacgccgttatgggtatggtcgcagttgctgtatgtacaccaccaatcggtttaggtttagcaacgtttgttcaaaagtataaattcaatcattccgaaagagaaatgggtaaggcttccttcactatgggactatttggtattactgaaggtgctattcctttcgcagcccaagatccattgcgcattatacctgcaaacatcattggtgcaatgattgcatcagtcattgcagccattggtggtgtcggcgatagagtcgcacatggaggtccaatcgtggctgtattaggtggtattgatcatgtattatggtttatctttgcagtgatagtaggtagtcttgtcacaatgactactgtactattattaaaacgcaatacaccagttatagcagtagatgcaccagcgcaacacacgcaacttcatgatacagatattacacaacatgatacagaggttgacaatgtagataacaccgcgaaacattcacatctcaataaaccttctcatgtttttgatcaacaaactatgataattactgatcacgacatgtctcgaaacgaagcaattgatatgttgattcataaacttaaaatttgccgttatgtagagcacacatcgcatttaaaaaatgcaatactagaacgtgaaatggagtctacgacagctattggcatgaacgtggccattccacatgcaaagtctgatgttgtaaaacaaccgattgtagctgttatgaaaaataatcatggtgttaaatgggacagtctagatggtagtctacctcaattgatattcttaattgccgtaccaaacaacagtcaggatacacatttaaaaatacttcagcgcttatctaaagcgttaatgaatgatgagacacgccaatcactaattaatgcaaacagtactacagaaatttataacttattaatgaaaatatagaggagttttaactatggcattatttttacaacccgtttttaaagacagaatttggggcggtcatgcattaaaagcatttaactatgatatccctaatgaaacaactggtgaatgctgggcaatttctgcacatccaaatggtcctaatacaattatcaatggtccatacaaggatatgaccctagatcaactttggtcacaacatcgtgaattattcgataatgattcacgagatagtttccctctgctaactaaagtattagatgccaatgataaattatctgttcaagttcacccagatgatgactacgctttaaaacacgaaggcgaactaggtaaaacagaatgttggtatattttagatgcagccccaggtgctgaaattatatatggcgtacatgcacataataaacagacgttaatagacatgattgataatcatgaatttgacagtcttttcaaacgtatacctgttaagcccggtgacttttattatgttcctgctggcactgtccatgccattggttcgggtattttaattttagagacacaacaatcctccgatacgacataccgtatttatgactatgatagacgagatcaaaatggtcaattgcgtgatttgcacttagagcaaagtaaagatgtgattgaattaggcaatcatgaaccaaatactactcctataacaactcacatcgacacacacactgtaactcaatttgtagataatcaatattttgcagtatataaatgggatattcatggagatttaaaattcaataaaccacatgcttattgcttagttacaattatcgatggtactggtactttaacagtaaacgataagcactatgacatccaaaaaggttctagctttattttaactacggaagacgaggatattcactttgtcggtaatattagtgctatagtaagtcatcctggataatagcaatgataacaaccgtcccataaaagacagaaattactatctcttctgtctaaaaacataaaaatccacacattaaggagctataaccctaatgtgtggatttaatttttattctgtaacgttactttggtcaactttttcagatacgcgcttcatcaatggatctgttacaggttttaaaattaaacctacaacgaagaatcctataccaaataacgttaatataattaattttgtaattaggatttccggaacaataccgcctactgtttcacgtaatgaatcaattgcatacgtaaatggtaagtatggcgaaatgttttggaaaaattgtggcgtagtttgaattgggaatgttcccccaccacctgcaatttgtaatacaagcaatacgattgcaatggctttacctgggttaccaagtaatgatacgcacgtatatacgattgagttgaaaataatcgaacagaaaatcgttataagtacaaataatacaggtgactcaactcctgcttttaggattaacaaatctccaaccgatacaatgagtgcttgcaacataccaagcattataaagaatcctgccttacctaagaacacttgtcttgtcgttaagactgactctagactcttatgtttattatcaaccgttaataaacttaccatcaagagtgcacctacccatactgacagtgcagtatagaatggtgtcatacctgaaccataatccttaactgggaaaacatcaacagtcttcttattaataggatttgcaataatacccgcttgctttttcaaatcattcttaagtgtgtcgattaatttgtcgactgcatcatctttgtctaatttcttgaaaattttattcgcttttttcaaatctttttcaacatcaggcaatttattttgagaaaaatcagctaaatctgataaagcctttttcgcttgtggctgatttttatttagtaatcctaccgcttgatcataaccatttaataacgttggtaaatttttattcacacttgctgtcgcattagttaatcgctgttctaactgtggtaagtcattgcgcacaaagttagcagctttagctacatcacttttcactttcgagaagtttgcttgagcatttttaacagcactaatgtattgttgttcaatacttggtaatactgtttgtaagcgatcaatacgtgttttaccattttttaaaatagcttgtccactgttaatgacttgatcaattgtatttaatttagactgaacattggataatgcagtttgccctttgttcaattcatccataatacgttgtgatattgatactaaagagctgttaagatcttttttaacataatctctaaatgatgataatgatgaatctagttttgaaagttgatctagtaatttagtagcttcagcagttcctgaactaccattctttaatgcattgcttaattgattaactaaccttaatgattcattaattcgattattagctgcttttaccttatcaatttcttttgataaatcaacattttcattcttctcaatctcttttaatgtatcgataaattgttgattatattgcgttgtgtattctaaaccggacttaacattatctaaagactctctaaaatcagaaggcttgtccgatgctaaaatcccatacgaaatattacgtaatgcctgactatctttttgtgcggctttcgcttgggtatctaaattatttgataatgataataaagagcccgttaatgccgcttccattgatttaacatctttatctgtaatgttttgtgtgttctcgttagctgtgctgacttgtgttgttgttatatctacaaaactttgaccatcttttttcccgcttgtactttgtggtgtagtcgatacaggcgcattattactatttggtgcggtattttgcgtaacattattatttggtgcagtatcgccacttggtgcacttggtggcgttgatgctacaccattaccagctgcaggtgcactatttgatgtttcgttgttcgccgcgctattttgaggaatctgttgctggtttcttcgatttaaatcttgcgcgcgtcgaattgcatcttgataatcaccgactctacttctaacttgtgtgacgaagcctttggcatcatttaactgtccattagcttgatcaataccttgactcgcaatgttaagtccttgattaattttagggaactgcgctggcacgtcatcagctgcaaaatttaacgctttttcaattttcggcatataattatttaaagctaatatcaacttagccttttcattaagttgcggaatagcaccattgacttcgtttaattttttctgagcatctaaaatatcacctttataatttcctagttttctaaaatcattggcatatttatctaaatccgcttggtggttattcaaatatacaattttattcgcaaagtcattaatcttaggtaaagctttatctgctgaatataccgcattttttatcttgttaattgtcggcacattttcttcaatagttaaacctgctttgttagcttcttctaataatgctcgagttactgttttattaaattgttcattcgctttttcaacgacaactgacgaaccagtatctgttagcttagacgcaacagcgttaatcttctgattcaccttaaattctacatctgctttttgaggctgcttacgtagtgtccctgtaatttcatgtgtaaacttagatgggatgtaaatacctgcaaaatatttacccatttttatctcatgatcagctttctctctacttacaaactgccaatcaaaacttttatttttcttgagtgtattaaccatcgtattaccgacattaacttttttccctctgattgtgtcgcctttatcttcattaacgactgcgaccttgatgtgtcccgtgttgccatatggatcccacattgcccataagttaaaccaagcgtagaacgatggcaaaatagctaagcctgctaagataatccacacagctggcgtcttagctactttcttcagatccattttaaataatttaaatgcgttcttcattgtcacactcctatgtaggaattattcatattttttatatattttttgtaaattaatttatttttgcgttgtgaattagtataatcaatttactggaagatatttagtcgattgatacctatcaactattttcagcatacgataaattataacaaatcatagtttattatcacacttaattattatatttttcaagggagaatacgaaatatgcctaaaaataaaattttaatttatttgctatcaactacgctcgtattacctactttagtttcacctaccgcttatgctgatacacctcaaaaagatactacagctaagacaacatctcatgattcaaaaaaatctaatgacgatgaaacttctaaggatactacaagtaaagatattgataaagcagacaaaaataatacaagtaaccaagacaataacgacaaaaaatttaaaactatagacgacagcacttcagactctaacaatatcattgattttatttataagaatttaccacaaaccaatataaaccaattgctaaccaaaaataaatacgatgataattactcattaacaactttaatccaaaacttattcaatttaaattcggatatttctgattacgaacaacctcgtaatggcgaaaagtcaacaaatgattcgaataaaaacagtgacaatagcatcaaaaatgacactgatacgcaatcatctaaacaagataaagcagacaatcaaaaagcacctaaatcaaacaatacaaaaccaagtacatctaataagcaaccaaattcgccaaagccaacacaacctaatcaatcaaatagtcaaccagcaagtgacgataaagcaaatcaaaaatcttcatcgaaagataatcaatcaatgtcagattcggctttagactctattttggatcaatacagtgaagatgcaaagaaaacacaaaaagattatgcatctcaatctaaaaaagacaaaaatgaaaaatctaatacaaagaatccacagttaccaacacaagatgaattgaaacataaatctaaacctgctcaatcattcaataacgatgttaatcaaaaggatacacgtgcaacatcattattcgaaacagatcctagtatatctaacaatgatgatagcggacaatttaacgttgttgactcaaaagatacacgtcaatttgtcaaatcaattgctaaagatgcacatcgcattggtcaagataacgatatttatgcgtctgtcatgattgcccaagcaatcttagaatctgactcaggtcgtagtgctttagctaagtcaccaaaccataatttattcggtatcaaaggtgcttttgaagggaattctgttccttttaacacattagaagctgatggtaatcaattgtatagtattaatgctggattccgaaaatatccaagcacgaaagaatcactaaaagattactctgaccttattaaaaatggtattgatggcaatcgaacaatttataaaccaacatggaaatcggaagccgattcttataaagatgcaacatcacacttatctaaaacatatgctacagatccaaactatgctaagaaattaaacagtattattaaacactatcaattaactcagtttgacgatgaacgcatgccagatttagataaatatgaacgttctatcaaggattatgatgattcatcagatgaattcaaacctttccgtgaggtatctgatagtatgccatatccacatggccaatgtacttggtacgtatataaccgtatgaaacaatttggtacatctatctcaggtgatttaggtgatgcacataattggaataatcgagctcaataccgtgattatcaagtaagtcatacaccaaaacgtcatgctgctgttgtatttgaggctggacaatttggtgcagatcaacattacggtcatgtagcatttgttgaaaaagttaacagtgatggttctatcgttatttcagaatccaatgttaaaggattaggtatcatttctcatagaactatcaacgcagctgccgctgaagaattatcatatattacaggtaaataagtattatattaaacccgtaaaatttataagtataaacaaggagttcggacttaaacatatttctgttcataagtccgatttcttattcaattaaacccgaggcattcagttcgaacgcctcgggtcgttttatataaatatattattttatgttcaaatgttcctcatcatatccgtttcaattgccatctcacacattttataaatatgagcaaatgtacttattctcaaacattactgccgagctttaattgacgttatattaactataaactacttttccatgactctacggattcaatgtcacatgagcgtgataaaatttgttcaataataaagtcatgtttatcatctgatctatcaccaacagcatcttctaaaacagtaatataatagtctttatctacactttctaatgccgtgctcaatacagctccacttgtagagacacccgttaatactaaatgattaatatcatttgcacgtaaataaacttccaagtaactacctgtaaatgcgctaaagcgtcgcttagaaataatcggctcatcttctagtggtgctaaatcttcaagtattcgtgtagatgcatctgcttcagtaatcgcatatccttgagctttaattgttgaaaacactttattactcgaggagacatcattaaaatgcttatctaacactaaacgtatgaaaatgactggtattcgatgttgtcttgctgcttcaattgctctctgattcgctttaataatattttttattctaggtacactactcgctataccttcttgcatatccaaaactaatagcgccgtttttcgagacatcttcattctcctttacttgtgtagttctaagtcgttaaattcattataacgttaaaatgatggacaatctattcattgcattttgcatatacttcacaataaattaaggggaaataagacgtcttatatacttaaaaaaatatatagatgctcttcccccaatataattatgctttatttttcaacttattgcgtcgtgataaccaaatcattagtacacccattgcaccaacaattacagatatcggcaaccaatgttcttttatcgttacccccgctttaggcaaagatacattaccatcagcatttaataatccacttaacaatccattacctttaccaagtgttaacgtcttttctggctttggtgtgggtatatctggaatactgtctaataaatctgatccttgattcattaaatttgctaacttatttaaatctgtcgttttcccatttttattcaatcgatctagtaaacttggacgatttactattggtgataaaatataatctatatcttttttcgtttgattgagtctcttttgtaaattcaataaatcatccgctttaccattcaatgccgatttaactaaattaaaaattttattttgatctgtttctattttagtaattaaatctgccagtaattttgccttttgtctttctatacgtgttgctaaaatcgtttcaattgcttgttttttatctttggcattattcaaaattgcttttaatatatcatctgaagacgtgtcgccagttgatgcaaaatgtttcttcaattggtcaacgatttggcgatttgataatcctttattcgtccaatctttagccaatttatctgcttcagcttttcctaatttcgtttgtaaaatttgagaaatcaatagcgacttatcttgtgattgatcaatcaatgacgttaataaatcatcactcgttgtcagagataattgatcaatatgacgagtaatttgatctgcaatttgttgatctgttttaccatcaacacgtatatcttttagaattttaactgcctcgtctttattaaatatactttctaaaatgctttgtgtagcatactttttatcatcagtacgtgcaagttcttccaaaataatatttcgttgactttttatacgctctttcgtcttatttacttcgctcattaagtctgatttttgatttttaggaagttgcgtatttgcaatacgttgatctaaagattgtaacgtattcagtttatgatatgtgtaatgttgcgttgaggcattacttttagctaatttttcaatcatagcatgattaattttatcgcttccttgtaatttatcagtgagtcgattactatggctttgattctcttcatttgaaaggaatttatttaacacaacatgtccagaaccatcattatttggcgttttagctacttcatgattattatctgttgtagacactgctggatcttccgatgtatctttcgatgcatctttcgatttgtgtatttgctgattcaaatggtctaggtcttctaacgccttatttaccattgcttcatcatttttatcatctttttctccatgttttgttgtagccgtttgtgacatatcatttttcattgcattaagatcgtcctcgccactttgttgacccctatcaacatttgaagaaacctcatttaaatctttaagcaattgatctaatttactgtctatatcactttgaccgttcatttcagtgtgagaacttttattgtctttgctatccaactcattagctcgttttatgatttcatctatttgcgatgctgttttcgcttcatttagttgtgctttataatgttctttagatgaagccgataactgttttaattgctcaatttgacgaattgccttgtcaactttgtctaataaatcttgcttagataatatctcttttgtaatttcagtatccttttcagatgcagcttgggcatcgtacggcaagatattcgttaaaatgatacttgtcgccatcattgtcgaacacgataactttacatataattgaaacggtttccctcgatatttagccatcaacatactccttcctcacttacttccttcaaagaattacatactattatatacctgtttacaagaaatttacacttatctatctagttattgttgttagtaattatctacttattacttagcttatatttaagtaaacaaaacaagcatgacgtaatatcatattgtccatgtcgctaacatcatattacgtcaaatcttttatattaaatgatgttttattttagactgctttttccttttagctttcgagcgcctgtttaaaaacttgctcgaattgttcacgcgagatttcgtgtgcatgtgctttttgtgctaataaagcatctcgaaactgttgttgatctttcaaactttctaacatttgtattaattggtctttactttccattgttatctcatcattatgctcaaataagtgctctgataatgttactttagcatggtgtgcggtttgacgataacctaaaatcaacaactcatagtcaaacgcttgttccaccgcatttaaaatttcattaccctcattgatatcaagataaatatcacataactggtatagttcatttaccctgtcaatattaatagatgggtataaatgcacattagcatattgatcaagttgcattagcttatcagacatctctgtaatagcagcgatgtgaaacttaaaatctggtaaagtttcaaccaataccttgatgttacgaagttgatccgagttagttaatattacaatttctttagtatatctattacgactacgatagttatatagatatccgccttgtaaaatacgagattgaacctttgcgtctgctatattgagcatcgtttcatattcgtttttatctggaataataatattacaatgtcgtttcatatcacctttacacatcaattgcatatttcccgggacattaccattacagtgttcttgccataccaaaacatcactaccttttgatggcaaattatataacactgaaaatggtagggctagtgagttaataacgaaatgatgttccgtaatttcaagttgcttgataaaaaataatgcgaatgcgagctttgaagggaaaaagtaagacttcccttgccaatccaatatgacatcagatgttacaaaattttcataaatcacttctttaccttctgctgtcatatatttcttcaagatcgctttacgatttaaatcgtaaacagtttgtgcaaatttaataccattcttagaataataatcgacaaatcggacacgttgttggtcatcaaaccattcgacacgactaacaattctagggcgctctccactttgataaaatattttacctcgtagacgtcccatatcattaattgtagccgaattgttgttacctttaatttcccaaaaagctggtacagtaacctgattaaaaaatcgtggtttcatattttctgtattatgattatctgcaaaaaattgatacggtgatataacatcgtccggtaaaaagccattgtcattgagtacaattgttaaatcttcttccaacttactggctttaaaagactcatataactttcgtgaatgatcgttaaagtaatcaaataatttaatcatgtagcacctcttgaactaatgtttcccattttaaaataatatcttgagtcataaattgctgtgccacttcataagagatgtcatgtggtgtctggggaccattgttaaaatacattacaatggcatgagctagttttgcgataacatcatccacactatcttcgtcggtatcaaaaggtaccaagtagccattttccccatctcgaataaaggttgggttaccataattcacatttaatccaatcatacctagtcctgagcctaccgcttccattagtgttaacccaaaaccttcgctagttgatgcagaaagaaataactcataatcattataaatttcatcaagtttaacatgccctagtaaacgaatataatcttgtgcgcggtgtgtatcaataattttacgcagtcgcgtcttctcgctaccttctccataaatatcaaatgttaattctggcacttgtcgtttagccacgataaccgctttgacaagccaatcaatatgtttctcattcgctaaacgagatgcactaatcatcgcatatggctttcttgataatgttggatatgataatgcatcaatgcttcccacaggaatagtataaacacgtgggcgataaccttgatattgctcaaattgtcgacaaaccatatgattttgaatatctgttgctgtaataaagaaatcaatgtatttagcttttgaaaattgatattcataataattgttccatagtatatgctgctcactcatcatattattactataatgatcagcatgaatcacaacaccaactttactatcacctttatgctgcaaaacagcctgaccaatatcagaagcgcggtctaatatgacaatatcgtctcgggttaaattcaatcgttgtaaaaagtatgcaataaattccgttttgttatacaacaccgcatcttcaaacacatatatagagctgtctccatcaatatattcgttataagcgatggaaccatcttgattataaaattgtcgcatatataatttcgctttattatcagctggtgcataatactcagaaaatatgcgcgtataactataaaaatctttacgtactaacatactattaattacaaattctgcacgatccacaatatctttttgttcattttgcagataacatgttacaaatgatgatttcccattaaaatataggcggactatcttaccatttctttctctaaaactaatgtcatgaccaagctcacgttcaatgtcatctaacgtgtacgttgttggtgctaaagaaatatcactaaaatactgatacaaccaaataacttcttgatctttaaacccaatgttttgcgttaatgtctgtatgttctctgactgtataaaatctaaaaacacaaatttagtgtcttgatttgtacgtctcaataatttagcacggtaagcttgtgcatattcaacaccgctactcgcccagcctataccaaagtttatattatatattgtcatgcgctaccccttttcatttatggaaaatgtataactggcataccctctttatcaaatgtaatcatgctttgacaaatatttttcaccattctttttttgatatttcgtgtcataacttcaaatgaatctaaggcaactctatggtattcaaaaatagcgttacgttgcccattttgtcgttgattaacgcttgcttttaattgttgtaaatagtcgacttgttctaaccaacatgaatcaattgctttcaaaaagactttttgaacgaaaatattataataatatgcactttgcatgtttttacgattcaaagctaattgcttttcaaattgctctaataaaaatgtcactactgcttgcttatctttaaaattaacacaagccacatctttattaaattggaaacttaaattttgataaatatactcgacaacacgcgattttgttagcaccttttcctcatttacaaacatttcaaatacatctttagctaacgctttaaaatcttgattctcagcatcatctatttctaaaactcgattgcgttcctcgtatacaagatctcgctgtatactaatgcttttttcaaattcattagccatttcacgagctttaaccccttgttcttccgagatacgctgcgctttaactacaatttgcttaactttgcgattaaacaaattactttgcgataatcgttgtgcatctaatgaatataattgattattttccgctaaattactatcgctccatcgcttaactaaataatcatctagtgaaatatatatacaagatgatcccggatccccttgtctaccagaacgaccacgtaattgcctgtctacacggctattttccatatgttcatgaataataacagctaatccacctaatgcttcgacaccttcaccaagtttaatatctgtgcctcgacctgccatactagtcgcaacagtcatggaaccaatttgccctgcttcagctatcatctgcgcttcttttgcaacattttgcgcaatgagtaaattattaggaatatccatttggaataatactttcgaaaagtattcagccgcttcagcagttctcgttatgagtaaaaccggtcgccccgtttcatgaagttcaactatatcatgaatcatcgcgatgtttttctcatcaactgaacgaaacactttatctggttcatcgatacgttgaatcgctttatcagttggtacttgtacgactatttttgaatacaaatcaaagaactctgattcgcctaattttcctgtagctgtcatacctgaaaatgattcaaaaagtttaaataaattctggaaggtaattgttgccataacacttttatctgttgaaacctccataccttctttcgcttcaatagcttggtgaagtccagcttgcaacttagttcccggtaacatacgacctgtaatacggtcaattaaaacaatatcaccattatatacaaagtaatcgacattagattcaaacaaatattgtgcgcgcagtgctaaattaatattacgcactaggaccatcgcttgttcgctatataaatcttcaacattaaagtatgattgtgccgcttcaataccttgatttaacagccatatttcttttttggtcttcttcattttaaaatgcacgtcttcaatcaatgtatctacaaactctttcacaatatgaaatagatttgattgtaatcttggtgcacccgaaataactaatggtgtttgagcagcatctaaaatgattgaatccacttcatcaataataccgtaatttaattgtggtaaaaatttcccttccgcactatcagccaaattatcaattaaataatcaaaaccgagacgtccattagttgtatatataatatcatgttcatatatattacgtttttcccctttttgatactcataatccacaatatcaacaaaacctaatgaagcagttaaacctaaccattcatataatggttgcatctcttcaaaatctcgcttcgctaaataatcattcgttgtaattaaatatgttccttttcccgaaagagcatttaaatataaaggcatcgttgccgttaatgttttaccttcgcctgtttgcatctccgcaatgttaccttcatgcaatacaatcgctccgattaactgaacttctttaggatacatacctaatactctccagctcgcttcacgtgccactgcataagcttcaggtaacaatgtatctagtgtatcaactcctgatgctaaacgttctttaaattctattgtcttttgttttaacgcatcatcagaatatgatttaacttcatcgctccatgtattgatgcgtttcactatttttctaatcgactttagtcttaattcgtttatcgtaacatctagtttatgtttcatttacttccccaccattcagtttcgatacatctaagtaatctaaaaatcgtactggattcattaaacgtgacatataatttagatgtttgtcttgctcttctttaaaataaacctcgacatttgtatcttttagttcatgatttcctgggacatgttctgtaagccatccttttaaatcatcatcttcatggcttgtacgatacactttgcaacccaaatgctgagcgacataagttgcaaaaacatttgactttgacccataactaatcaaattaatagcctttagggtatcttgactttgcaaatcattctttagttgcttaatatttccctcgatattgtcgtccatccaacgttcaacgagccaaacatgaccaaacagtttcaaaaaatcattcgaaatagttggataggtgtcagatggttctgcaataatgacattgatcatatcatttccatattggtcatcgcctatcttcgtcacccgcatgcttttatactctaaatcatattgatgcgtcatctctgtgattgttaaacatctaaatataagactcgtcgatgctgcattcatcatttttattttataagcataggcttcatcaggatattgaatcgtaatactatttgactttacaatctcagtacttagttttgtgccatttttattataaaaaatgatgataaaatacactgaaccagcaggcgttgcatcaaaatcaaaatgcaatttataatgctgtcctctacgcaaaattggtaaacttggcgcacttttatattttgaaaattgctttaacatcaaccactcatgaatcggtaatccagagggcatcaaaggatttataaaagtcacttcaccatttgaaaatgatactttagagccatacataaatgtagtttgtgaaatataattccaagtaactttaaatgttttgtttttcagcatgttgaactctcccaaacttgtcttccaaaataatgttgtaaaaattaacaaaccaacttgcaatggtaggtgaatcatcattatgtcgcccaggaatactgcgattcatcactcttgcttggtgtgctgtcaatacaggtaatagctcttgaaatgcatgtggatcataatcatcatgttgcatatatgctatggcaaaaacagtttgtgacaatgatttcttttgaaatgtttgccaaaatttttgatttaatgcctgtatcgacgcttgagatgtatcaccttcattagacaccaggacgtctaatgctgtaccgaactcttctggtctaagtaatcgcatatgttcagcaatcgttccaatattaacaagtggtttaccaacaataattgcctgaggatttaactgagcaccataatacaaggcaccaaatgaacccatagataaaccagataatattaattcatgtgatttaaaattcagcttttctaatgtctcgtcaataacattgataataccttgttcatattcagatgaaccgatataaaaactaccaccttcaacacgaggatcgccgataagtaaaaacggtgcattcatacgtttcatcatataatatccttcgaaaccttccgctgttcgataaccactaaaatatacgtttagtggcggtttcatatcaccagggtggaaataataaataaattcctgtcgttgactatctacgaaacgactaccaccaagtaaaaattgacccatgtctaatctagaccatcgtttgtgtataggtcctaaatgtaccgtcccgttcccacgcgccttaacagttacacttatataagcatcaaatggtttcgcaggtatctctaaaggactgtctaacatatcatcagtcaatacgatttgttcaattaatgcaccatcagcgccagtctgaatcaatctaaatgtatattgcaactcgaccgcaccatcaatatcaaattctggccatatttgaatgactttatctttatcgtaaacgagattattttgccaagatgcgataggtttaaattctttcccaaattctccactcaatgtgagctctgaattaccttggtaaacgacatctcctttaaaattcggatgcacaagtgctaacttaggagaaaccttatctccatactgtcctgagaagctaactgcctctaatttattattacgttcttcaatattccggtaatgtaatggttgaacaacgtatttttggacattttcgtcttgttcatattcaactgaccaaaatgattcatcaacatacgtattgtatggttcgcttatcatttgtaataaattcgttaatgtctccgagtatggtgcttgaatatagataaaatcaaagcgcccttctgcttcaacaatcgcttcaatagcctctacataaccactatcaaattcaaacaatccaatatcgaagtaatcccaactcacaccttttttgtgttgaaaaataggttctaaatcgtctcctccaatttgcaaaactctaaatttacgtggcatcattttcaccttctattaactcatcgagctgattaataatattcttagaagcatatgcatctattaattttaaagaataggcgtacgcataattccaatttttcaaataaaataaataataatttaacgcatcatctaattcatcaactgtatttataatacggccattgtcataatcagagacgtaatctgtttgttgaccattaatttgtggaatcccagcgctaattgcactaatttgtaaatacaagtcaggttcttttgacatatctatcacaagtcgcaacgtccgcaatgcttctacaacatcatgttcagcatgtatcgtcttaacagcaatgatgtcatcttgatcttcaggtgtcattaatgctgaaacattaacatccgcattctgtttagcttggtattcctcatttaccgacgtaatacattcacgaagccacatcggtatgtcattttgatggcgcgataataaaattaaacggtaataatcttcctgtgcgatataatccacaagtcgttgcatcatttgttgcaaatcagcgtcactcataccatctatccatacacctataaatgtttccatcaattgactacttatattaggtgattgtctcgtttcaaatggtgtgattcgaatcattgtattctcccgctgatacttctcttgatgactaattaaatcacgttctagttgcacactatcaacaattaaatgggcattctttacgatagattgatattcctcatctgacacagtttcatttctatttttaaaaaatgaataacttaatgatttcgctggaatatgattggctatttgtcgattgtgcctagcatctgaagccacaatcacatgatcatcttcatgtatttgttgtgcaatcattgcttgaaatttttcttcaattagttgagccatattgttatattctgtttgttgatagtgatgttgatatctttttgaaacagtgactctgccatttttcaaatcttcatgaagtacacaatctccattaatcgttaaatattcttggtaagaagcctctccctgatcatcaaaataacgtatcgctgataaataacctctgtcatcaaaaatataacgccgttgtaactgatctctttcaaattcttcaaaccaaattgaatacccttcttgactaaaataaatatttgtataggtctgttcactcgtcacacattttaataaatacggtgtgtacacaaactcaacatcatccggccattttaagtgatgataattaatcgcttgtggcgcatggtgactgaatccttgaatttcatcaaacacagacgaatactttgtctcatataagtcatatcgatgtaaaaatgttcttaaatttggtgcatgattgagaacaatcagttgataatctaagtcattttcaaggtgcattcccattaaactaatcatatcgtcaaattccgtcttattttgtagttgataatacggcacagtcgtgtcttgccaccatcgttggtcatcgtaccaagctggaataaagtatttcataattacctccttaccaatactggtttaaaaatggcttatatttatcaaaatataaatatgtacgaattgtttctgcaatattaatactgatgtaaactaatacaatcagttgtactgagaaataaatttcagtagataaatgcggtacaaacaatgtgaaataaagcggtataccaataatgactgtaactaatgccaatccaaaccaacatacgcgtcgtgcttgataatttaaataacgttctgtatccttaccaggtttaactcctgaaaaataattgccactctttaagaaatctttggatttttgtttagtattgattaaaaatctcgataaaaaataacccaataacatttgaatcactaaatatactgaaatacctactggactatcaaatgtcagcattggcatgtcatctgatatgcttttattaaacatagataaaataaaatgaatgccactttttaagaaaacaaaagctgaaatactcatcattaaagtaatactgcctgcagggttaactttccaagataaataagatttcatatttgttgcggaaacgttcattaaatcgatatatggtattctcacttctactaattcaataaataataagataaacaatgtgattatcacaaggatgattaacaacgcaatcacaatatgacttgcatctatatattccattttttgatgcatcattgatttaataatactaaccattacaatcggcattggtcctgcgatgccgtagcgactatttttgtcagctaaccaaactaataacatcgttccagtaaccaaaatcaatattgttaagtaaatattgtcttgatgaacacgttctttcgaaacatattcatgaatcacaaaataactttgaataacacttaaaattaatgttaagatgcgctctttataatgcttctcaagacttgtttgtttcatgtatttatccatattccgataagaaatcagcatcaagataatcattgatgttaaccacggacctaatcctaaagtgaaaatgtttaaagtattaacgtctccacccatattagaaatagctattttaaaaaatgactcatgttttacttgcatatcgttataggaaacgatggaaatgtttgtgcctaatatataaataaacaagataaaacatgtgtatagcatacgtttatatataattttatattcgtattgttgtaaaagttttaacatgttgcacctcttttatatcaaaaacattaaaaagactaagggttcatcactaattattaaaatcctatatcgatttttctagtgattggtgcctcagtctttttaattttagccagctataaattcaatttatgcttgagaatcatcttgatcattttcatctttctttttctttctcttcattaaacctaaaccaactaataatgtcataacgccacctagtaatccattttgttttattgagtcacctgtatctggcaatcttttttcactttgtgctggtgtgccattatgtttagtcacttcagatgttgcacttaatgtagactgagattcactcgtgctcgttgttgcttcacttgataagcgagatgtgctcgtgctgtgagtatgatgcatactcattgagtctgacggatgcattgagttagattcagatgtacttgttgagccggacatacttgttgatgttgagtcagaaatgctttgtgaaccagacatagatgtactcagtgattcggatgtgcttgtcgaatcggatgtgctcaatgacgttgatgtgcttgttgacactgattctgagtcactaattgatgttgagtcggatttgtcttgtgacattgaaacactcgatgaattagattcactcattgatgttgagtcagatacgctcgttgaacctgaaccagacgtacttaatgattcagatatgcttgttgaagttgaaccacttgttgagtccgatgtacttgtcgatgtcgagtctgaatctgatgtactcaatgattctgagtcactgatagaagttgaatcacttgtagattctgattctactgtactttgtgaaccactgatacttattgaagtagaatcactgatactgtctgatgttgataatgatgtcgacaccgatgtgctttgtgatgacgatgtactagcactcattgacattgatgttgatatcgatgtacttaaggaaccagatgcacttgtacttgttgactggctttgtgacattgaatcacttaatgatgtagatgtgcttgttgagctcgagtcacttacacttgttgaacctgatattgagtcacttaaacttgtcgatgttgaaactgatacgcttccgctcattgagtcagatgttgaaagtgatgtactcgttgaatttgatccactgatgctagacgaatcacttgtagacattgagtcgctttctgatgcactgatgctcatagagtcaaattgactattacttgttgagcttgactgcgaatcgctcacacttgttgacgttgattctgatccactcatactttgcgagctactcaatgattttgaatcacttaatgaatccgaagtgctaagacttgtggaaccacttaaagatattgatccacttaatgagtcggagtcacttgtactagtagaatcactcattgatattgaatcacttagcgaggtagactcgcttacgctttctgaaccacttaatgatgttgaggtactcaatgaaccagatgtacttgttgaagtcgaaccacttgttgattttgaatcacttaatgaatcagattcactcacgctttctgaacttcttagtgacgtcgatacacttaatgatgacgaatcgcttgtgcttactgaatcgctcatcgattgtgagcaactcaatgaacttgactcgcttacactttctgattttcttaatgacgttgagacgctcaatgagccagaatcactgacacttgttgagccaatcatcgatttagagtcactttcagaattagattcacttacactttctgaatcatttacagattctgacatactttgtgaatcactagtacttgtacgcatcgaagtactagttgaagctgatgtactacgagagtcacttgttgatgttgatgtacttgctgatcctgatgcacttgtacttcttgatgtgctttgtgaatcgcttaatgatgttgatgttgaatcggattcacttgtactttctgatgttgagccagactctgatgtacttaccgatgtagataaacttgcaatggtcgacatgcggtttgaagttgatgtacttagcgaatcacttaatgatgctgatgtgctttgtgaatcggattcactgctttgcattgacgcagatgttgaatcacttaaagatgttgacgacaaatcggattcacttgcgcttgctgagttactgagcgatgttgacgtacttgctgatcctgagttacttgtacttgttgagtcactgagtgatgttgacgcactttctgatgttgactcacttgcacttgttgagatactttgtgaatcagattcactctctgaaccacttaatgacgctgatgtgcttaccgaacctgattgactcgtacttttagatatacttgttgaatcgcttagtgacgttgatgtcgatgtggattcactttggcttgttgactgacttgtatatgatgatgtgctttgtgaatcggattcgctcgtgcttgtacttgttgagtttgaggcactttggcttgctgagtttgagtctactccgctttgattcattgaggcacttagtgacaatgatgtactcgttgagtcagacaaacttgtactcgttgacgtacttgtacttcctgatgttgattgagacatacttatgctcattgatgttgaatcggatttactttcacttgatgatgttgagtcggattcactttcacttgtagaaccacttaatgatgtggatgtactaatggaatcagatttacttgtactgattgaatcacttgtcgacattgatgtacttaatgaatcagacttactatcacttgtggaatcacttaatgatgttgacaaacttgtagagtcagacaaacttgtactcgttgacatactcagtgatgttgaaacactctcgctcttaaacgttgacgttgattcactgatacttgtcgatgttgaaatggacgtactaccacttgttgaattacttaatgatgttgatgtgctaccagattctgatgtactgtctgataatgacgtactctcacttgtcgaactactcactgactctgatgttgattcagacgtactttcacttaatgattcacttaaaaaggcagatgcactttgtgattctgaatcgctagtactatttgattcacttaatgatataaacgtgctctctgaagcagatattgcttcacttatagagtcgctcgttgacgttgattcacttattgaatcagactctgatgtacttaagcttgtggaatcactcatagatgttgatgtacgttctgaattacttgtacttaacgatgtcgaagtacttaccgaaccagatgtgctcgtagaagcactttgtgatattgattcacttgatgcagttgatgctgatttgctatcactcgttgaatcactaaacgacgttgatatgctcattgaatcggattgacttgcactcattgaaccagacgtactttgtgattccgaagtacgtactgaagcacttgtcgacgttgatgtacttgttgaacctgattgactagtactttgtgataatgacttactatcagaatcagatgtactttgtgaatcacttaatgattctgatgtactacctgactgagacgtgctcattgaactacttacggacattgatttactgtctgatgcagataatgacccacttgtactgatagagtcacttactatctctgaagtactcatcgagtctgatgtacttgttgagacactttgtgatgctgctatgcttagtgatccagaaacagaaccacttgtgctcgtcgaatcgctcaatgattctgatgtactcatcgattttgaatcacttgtacttaatgatattgatgtactttgtgaatctgatttgcttgttgacgcactttgagagttggctatgctatttgaaatactgatagagtccgaggtgctagctgactcgctcaatgatgttgatgtactaattgcattcgatgtactgtcacttaatgatgctgatgtactagacgaccctgatatactcgttgataagctttgtgacttagacaagcttcctgatgtactcatacttaatgagtcactgagtgatgttgatgtacgcaatgaatcagatgtacttgttgatagactttcggatttttcagtactgctagagtttgaaatagaatcgcttaatgatgttgatttactagctgaatccgacatgcttgatgatacactttgtgaattcactaaacttgtgcttgttgagcttgatacactattactttcagatgtgcttaatgacttagatgcactcacagaatcagataggcttacacttgtcgatttcgaggtactagctgatgtagataccacaatcgatcctgatgtactcgttgatgcactttgtgagtcagctttacttgttgacacactttgagattgttgtgtacttcctgatgttgatacggaatcactcatgctatttcttgttacttcatatttaaaagttgtcgtcgttttgttaccgctcgcatctgtagaaacgattgatatagtacttgtaccaatgtttgttggtgtaccactaatagtattatttgtactatcaaatgttagtccggatggcaatccagtcactgtattcgtcaccgcatttccactgttatcttgcgtagcaattttaatcggggatattggtgaatacacttctgatgattgatctcctattggtgtcactgttggtgctgtcgtatccacaacatttattgtaaaagttgtcgtcgatttgttatttgcttggtcagtagacacaactgtcactgttgattgaccaatttttgttggtgtcccaatgattgaattcgttgcactatcgtaacttaatccgcttggtaatcctgtaactgtatttgtcacagtcccagtaccattatccgttgtagtcaatacaataggattcattgttttacccacttctatggtttgattgcctacagttacagttggtgcttttacatcagtaaaataatatgtcactgattgtccagcattcgtcatttttacagttttatttgtatcattataagttgacgcatatgaactatcgacggacgtgtagttatatcctttagcagtcaatgcagattgctgattatcgattgtcacgacttgatcaacatttcctgaatatgtttttggtggaataatatctttacctgttgttacatcaacgtatctcacttgtgtaacagcagactctgtatattcgaatgttccaaattgtacttgttgtaaatttgtcgcgccacctgttgaggctgtcattgataatgaaaagttggtcgtaccacttttcgcaatccaatctgaaatattacgtgtccatgtttgacctgcatatttgacagtcataacctttgtatcaccattatagttaatatcaaaatcttggaacgtgttatttgtaggttgaacatttaacttcgcagcattatcagctgttgaacttgatgtatacgttgtcgcaacaccataactatctgttgttacaaatgcaccaaacgcacctccaccagctacattagatgggtcagcattcgcctttgcagctgaatttggtttagatgtattgtgatacgtatccaatttgaagccaaatgcgttacttaagccaccaatacctactgcggcaccgtttaaccctgtttcacctaatacacctggtgaaaaggcaaaaccgataccatctccaccatttccatgcccttcatatttgttacctaaatttacttttccagaaaaatgaaaactcttattagagtcaatacgtgttcctaatgtaatagcacctttttggctgtatgcatcctgtgttaacgtcacaataccggtactttgatcataggtagcattacctgacgttgtcatatattgttttaagttatctttattaactgtaattgtattagcagttactgcggttgtcgtcgctgctgacgcaaatgttgacatagctaagcgactgaaagttcgaagttttactggtgcggtgctagttgacgttgtgctagttttgtttaagttgaccgaagatggcgttgtgctttgtgaagtgttatttgatgcagtactttgatttgttgatgtgttaattggttgttctgtacttgaagttgaagctacagatttagtatcagaacttgatgtagtattctttgaggatgttgattctgatgtagatgtcaatttctcttgttgattgcttgtactattagttgtcgaagtgaccttttcagacttttcacttgagactgtgtcactatttgatgtttgtaccgaactactatttttcgttacacttgtggaatcggctgttgatgttgatgcttcgattgtcgttgagttttgattacctactgtttcactttgtgtgtttaattcagaagttaatggtgcatcagaagccgcaaaagcttgctggtcatgcaacatatttaccgtgaatgcaccaccaataaccgccgtagttttcagtccgtatcccgtcatttttttactaatgctttgattatcttgactcactaaactatgactaataaatggtagccccataattttgaacatttctatttctttaattccggattttacccaattttttccagatttataaagtcttactcttgttttttcgtttgctaagctgtcatgaaatgctttctgtcttttactcatgtaataactccttgtattatctttacattcattagattataatatatgccactattcaatttaatacaactcttttttgatacaaaaatactcattttgttaaaatttgtaaaaattcatttttattcgtctaaatgtaatcgttttcatatttttaaaattactttttctcgtttatgcgtataatctttttttatataaatttggctaattggctttatgtttaatcattataattgtttcgtttttaaaataattattgtattaatatatctataccatccaccttttatttataaatagttaatttacaactaaacgataaatattatatgcaaaatacatctttaatattaaagtaataccaatattttttcaataaacctagtgtaatatatgtgtaattctaaaagattcttctttaaaaatataaataccacgacatattgctttaacattttcatttataaagcgaaaaaatgcatcgctactaagttgaatgtttagtaaggatgcattgaattcactaaaatgattaaattacttatatcttttcatctgattgattatcgaaatttcttccttctaaacctgctaactcttctttagaagctgcaggtgctttcatttcaaatatctcattcactactgtgtaatcgtaatatcctaatctggcaataggtttaatcgacttaatgtccaatttaccattatcaagaataaccttatcgtcaatatgaacttgggcaactcttcctataacaatatctacggtagatactggatctccagttggaatacgaatcgtttgaacgtactcacattcaaaatgaactggcgattcttttacacgatatcctggagcttctatacatttttcctttgttacacctgcaaaattaaattcatcctcttctggtggcaatgctttcgatgataaattaactgcttctcttaaatcatacgttgccatattccacacaaaccaacctgtctcttcagcatttttcactgtatctttacgttcgtgatcaccaagaacggattgatttgctgcgaacataaccataggcggatcccaagttaagttttgatactgactataaggcgctaaattatctttcccatctttcgatacagtagagatccaccctattggacgtggtactgtactacttttaaatgggtcgtgcggtaaaccatgacttcttacaccttgttttggcgaataattcatactatcttcaccccttataagtaattacatttaaggttacgccctctttacataagcgtctaatataaataaacaatttatttataagtagaaactatatatgacgtggttgcttataatttgcgttcttgattcgaaaaattcagataaggatttatacaattaatatttatgatatcttttgtaaatttaattaattatagttacttcaatcatgattagtttataataataaagtgaaattgaaaaagacagctattatgcgatgagcgaaaaacttcaagtaaaacaagaatttaacggcgttacaaggcaatacttgaatttcagaacagatagtatcgatgatctggataagttcaaaaaagaattcaaacctgttatgcacttaaaaggtgatgcattcaatcaacagttacaatctttgattaacaaatatccacaaatacaaaaaaatatgaaatcagagttcattgcttattatgataaagaaaaaaatagagaaacagtaaaaaactatgcttggaaccttcaaaaatctataaatgacattatgcaatcatatcctagcacaaaatttgtacagttttataaagatgatgtttccccgtcaatggtagatggaaatggccgtttaaaatcggatactaatgtaatttccatcgagggaggaaagtatgatgagaacaaatgatcatataaccgatttagatgctattgagttaagtagcggttggaattacaattcgaaattggagactggcaaaaatgcactactatcagatagccttttaagagatattaaagtattaagttctaatgctaaaggcgacgctgacatactagaaacagaacttcgtgctgtaataaactcaatgtctcaaaacgaaggtaaatctgttgatgcacttaaaaatagtaccgcttctctaaaaaacaatctaaccaaattaaaagagcaactcgacaaaactacacattaatttcatacattttgagtgaacagaattatatttccatagcaaacattcctaaactacacatacgttacataattgattcatttttatagaaacgggtaaaaatgataaagtaatcatctttcacaaaaaatcaaatattgggaggaattaaatatgattttgcgttacgcaacgaatttaaaacttgcgaaagagctataccaagccagtaaacctaaattgcaagaagataagggtatgattgaactgtttgaacatacttttggcttgcaaaaagaacttgtaaaatacgtcggcattgcagaagcaactactgctgctttatactcagctagctttatcaataaaaacatttctcgccttgcatcactatcaacgataggcattttaagtgtagctgcttacaaacatttcgaagctggccaaggtaaaaaaggtgcacaacatgcattaaatttattaggtcttgctactttaagtttactagatacattttcttgtaataaaaaatagtcttcattttagaagcacatactttagcacctgtgtacttttgattcaattcataaacggtataccgctatagcatgtgttttattatttttctggtctctttatcgtaaatattccccctaatttagcataatcatttccggctaaacgagaaacagcctgtaatgcgtgtggattgattttaaaatcaccctcataaatactgtcatcaatatgataagttacaatttcacctattattaaatcagccccatctaatacatctccaagcaatatcatttgcgatagtttacattcgaatctcattttcgcatctttaattcctggcgtcttaatcgttgtagatgttaaaagtgataattctgtacgactcaactcactgtcaccatatgctaacggcgctgcagtctcattaatatcttgaacattatcttcgtctgtaatatgcacaacaaagtctccagtccgttctatatttaatgcagtatcttttctcttacctcctgcacgttgaactgcaatagcaatcattggcggatgattattaacaatattaaaaaagctaaatggtgctgcatttactgatgcatcttgatttaatgttgtaacaaaagctataggtcgtggaataattgaaccaattaataatttatagttttctctagcagttaatgattgtgcatcaaacgtatacataatacctacctcttttctaagtatatctaggtatttctccgattttggttaatttaaacatctattctcctctgaaaatcacttgtatttatttagcaaatcttttgaaatatgacacatatgcatatcttctggatatttttctaaatgttgctgatgttcttcagcacttttaatgtagttagacagcggtaagacttccactgcaatttgatctctgtctttacgtcgttcaatgaactgacgcgcttcaattaagtggtcatctacacaactatataaacccgttcgatacttttgtccaatatcatttccttgttgattcacactgtaaggatcaatgatttcaaataaataattcataatgtctgtaattgttaacatacgatcatcgaaatgaagtttgacacattcagcataaccatcatacggaccgtctaatttagagcttcttccatttgctcttcctgcttctgtatgtataattccaggtattgttgcaaaaaatgcttcaacaccccataaacatcctcctgctacataaacaactgccatatttacacctcatcatccttttttatatttttaacaaggttataccatttaataccgccatgacatgattctgatacaccttcattacgatacccatatttttcataaaatgaaattaatgattctcgacatgttaacgttacaccatgtcgatgatgattcttagcaagagtttcaaaatagtttagtaagcgacctgcaataccctgaccttgataatttggtgctacaacaagacctaacacactaatatagccaccttcactattatttgtggagacatttttaaataaatcatcgctaatgtaacgctcttttatgactggaccgttgatgtatccaattacttcatcattcttttcagctacaataaaagtttcttgaatttgttcaattctcaatttcaatgcctctcgtgttgcagcttcttccggtgaaaaaccaatattttcaagtgcaataatttgatctaagtcctgcatgattacttttcttaataccataaaaacacttccttagccctatatatcaaaagtaataccttcatctttatattcattattttcaaactaccttcactataaaaaacgagtctttttattgaaagccattcgccttaatcaattagacaagttgtattatacgaattagtaaataatcatgattataattcattttaagcatactcaaaaagactggtacatgtataccagtctaattcgaaaaaatatatttagttaaaaccatttcaaaaacgacttcacttttcctggcttagtcggtctgtctaaataaacaaaattatcattgattactgaactggcatttcgaagtaatgcttcaatatcattcgaatatttcttcaatttatgattgtgaaataattcttgcatcaaaaatggtctttggtcacatgaatgtgcatctgaagctacaaaatgagccaaattacattctataaattgtaatgataacttttgaatgtttttaccaaatccaccaactaaagaactcgatgttaattgactcagtgccccatttgcaaccaattcatataatatttccggatttttggcgatacttctatttctttcaggatgtgcaatgattggtatgtaacctctcgattgtatttcaaaaaacaattgttttgtataatgtggtacttcgcccgttggaaattcaattaataaatatttcgaacgattaataccttgaatactaccattatctaagcctttcagaatcgaatctgtaattctaatttcttgcccgggaaataatttaatatccaatgcttgaacttctggatgcgttcttaactccgccaatttcacaagcacttgttgaaatgtattatcatatctcggatgcaaatgatgaggtgtcgctacaatacttgttacaccttcatccttagcttgctttaatagtgcaatactcttttcaattgttttaggaccatcatctatatcaactaatatatggttatgaatatcaatcatgattcatcagtcccataatatgcatagtaactagcacttttatctttaggcattctatttaagactacacctaataatttagcacctgttgcttcaataagttcttttccttttttaacttcatctctattattattttccgaattaactacgtagacaacattgccggtaaactttgaaaataattgcgcatctgtaactgtgttcactggtggcgtatcgataattacaaagttataattcatcaataatgtgtcatacaaatttgcaaatgcccttgatgtaattaactctgacggattcggtgggattggcccagacgtcaagacgtctaaatcttgaatttcagttgagataatactgtcttgataagttgaccaatttagcaataaacttgataggccttcattgtttggcaaattaaaaatataatgctgcgtaggtttacgcatatccccgtctacgattagtgttttataacctgcttgcgcatatgcaactgctaaatttgctgcaattgtagacttacctgcgcctggtgcctctgaagtgattacaatgctttgaactgcactgtcaggatttgcaaacataatatttgatcttatgcctcgaaatttctcgctaataggtgactttggttgttcatggacaattaaacttgatgtacttcttcgtgtattcgtcatggtaattcctcgtaaattaaaatttttgtattgaacctaaaataggtaatcctagttgcgattcaacatcttcttctgtcttaatacgcttatctaataattcttttaagaaaataatcaatattgctaaaacaataccaacaataatgctgataactaagttgacagatactattggagatacttttacagcattatcatgtgctgaggaaagtatcgtaacattatcaacactcataattttaggcatgtcatgagcaaaaactttagatattttattaacaattttgtcagattcagatttattcccagtggtaactgatacagtaataatttgagagtttgtttgattggttacttttaaaaatgaattcaactcagctgttgaatactgaccatcaaattctctagatactttatctagaattctaggacttttgataatttccgtatatgtattaacagactgcaaactactttgaacattttggaaagctaaatcacttgaggactttttcatgttcactaatatttgagtagaagcagtatatttgtcaggcataacaaaaaaggttaatgccgcacttactacaagacatattgccggtaaaataagcaataatttaatattcttctttagaatatttaatagttttactaaatcaaacttttctttcatggtttcctccacataatcaatcattgtattcattatgtatgttttataaatcggacaattatatctagtttaacgaccacaaaacatacacaactacattttctctaattatttatataaatattttatcgtttaaaattatatcatgattctctaccattatgtataacttatttatatttttgcacaagatataatattgtccaactttaaatatccaaacctattaataataaaactagataccatcgtactctatcatggctttcttataatcgagtagaagcatcatcattacttgattatttgctctttacaacaccgagcgtgcccgtactcggtaattcaataccttgcgtaacccgtcactgtgagttgggttaatgataataaagcccacaccttttaaaaagatgtgggtaatttatataatttttatttacatttttaacttataaaaaaagcgcctatgtcatgatttaccatcacataggcgcttatcaataaattattacttattactttccatttcatctaatttatgcggatttcctgtaattagatgacaacttattcttttcaggggaacattacacttttataatatgttcaaagacaaacttaaccattcacaaatataaagaataatattatcaaatcattgaacaaatcgtattttgcaacaattgatatttatattaatgtattgcatttaatttataaaattcatatacatcttaatattctcaatatcgatttgtattgtcaactttatatagatttaaaaaaataatctcatgtctttttttacaaaagtaagttaattattacaaactagtaacaaaaattatttcttcaaaaatatatttagtagcgaatacacttcatctttgaattgacttttactttcttccactgctccaaatttttgcgaaaaggatgctttcaaataccaactttcaagaaacagcaatattaaattctgaaagtcttcttttgtcatctttatctttgattcatcatagaattttgctatctctttacttaatgattgatttaaatcttgtatttgtccgtaaatatttccagaaaattcctcaggcgtattagataattgaacgtacattctaatatacctttcttcgatgtcgaaaataaactcaaataagaattgatataaagcatcaattgaatagttcgatttattttgattcatcataataatattattaaggtaatcaaaacaacatttaacactttgttcgtaaatactttttttcgagtcaaaatggtaatataaactcgctttctttatatttacacttttagctatatcatcaagtgttgtaccgtcataccccttctctgaaaataaggttattgcgttatcaataatcttatccttcaatttttataaccccctactgaaaattaatcacactatgttacaggaaaattaagttgcaattacaaatatttccgtttaattataacaacaatctattgcaaattaaaatactatcaattaccatatggcttacaacctaactaacgaaaggtaggtaaagaaattgcaattttttaactttttgcttttttatcctgtatttatgtctatttactggattgtcggttcaatttatttctattttaccagagaaattagatattcattgaacaagaagcctgacataaatgtggatgaattagaaggcattacatttttacttgcctgttataacgaaagtgaaacgattgaagatacgttgtctaatgttcttgcactcaaatacgagaagaaagaaattattatcattaatgatggaagttcagataatacagcagaactcatctataaaatcaaagaaaataatgactttattttcgtcgatttacaagaaaacagaggtaaagccaacgcactcaatcaaggcattaaacaggcttcatatgattatgtaatgtgcttggatgcagatactatcgttgatcaagatgcaccatattatatgattgagaatttcaaacatgatccaaaacttggtgcagttacaggtaatcctagaattcgaaataagagttctattttaggtaaaattcaaacgatagaatatgcaagtttaattggctgtattaagcgaagtcagacacttgctggcgcagtcaatactatttcgggtgtcttcactctatttaaaaaaagtgcagttgtcgacgttggctactgggatactgatatgattaccgaagatattgcagtttcttggaaattgcatttacgtggatatcgtattaagtatgaaccgcttgccatgtgttggatgttggttccagaaacattgggaggtctttggaagcaacgcgtgagatgggctcaagggggacacgaagtattactacgagacttttttagcacaatgaaaacgaaaaggtttcctttatatattttgatgtttgagcaaatcatctcgattttatgggtatatatagtgcttctatatttaggctatttgttcataacagcaaacttcttagactatacatttatgacatatagtttttcaatatttctactatcatcatttactatgacttttataaacgttattcaatttacagtcgcactctttattgatagtcgctacgagaaaaagaatatggctggactcatatttgtaagttggtatccgacagtatactggattattaacgcagcagtagttcttgtcgcatttccaaaagcattaaaacgtaagaaaggtggttacgcaacatggtcaagcccagacagagggaatacccaacgctaaaatcatcgctaaatattgtaagagaaacagcacttatcgctatatcttgtgtcttttggatatattgtttagttgttctactcgtttatattggtactatatttgaaattcatgacgaaagtatcaatacaatacgtgttgctttaaacattgaaaatactgaaattttagatatatttgaaactatgggcattttcgcgattatcatttttgtattttttacaattagcatattgattcaaaaatggcagagaggaagagaatcgtgaagtatagaaaatttataattttagtgttgagtatcttgatcatattgcctgtaagcacactggatggtcatcatattgcaaatgcagatgacgattcacctaaaaaactgaaatataaagaaaatagtgctctggcattaaattatcaccgtgtaagaaaagcgaattttctgaataattttatttacttcttttctagtagtaaagaaattaaaaattatagtgttagtcaatcacaatttgaatctcaaataaaatggctaaaatcacatgatgctaaatttttaaccttgaaagaatttttatattacaagaaaaaaggtaagtttccaaaacgaagtgtatggattaactttgatgatatggatgaaactatttatgaaaatgcttatccaatcttaaaaaaatataaaataccggcaactgggtttattatcacaggtcatgttggggaagaaaactttcacaacctcgatatgattagtaaaaaagaactaaaagaaatgtataaaactgggttatgggaatttgaaacacatacccacgatttgcataacttatctaaaaataataagtcaaaattaatgaaagcttctgaagctacaatcataaaagatttaaacaaaagtgaaaaatatctaactaaaaactttaaaaagtcgcagaaaactatagcctatccttatggcttgatgaatgacgataaattaccggtaatcaaaaaagctgggttaaaatacggtttttcattagaggaaaaagcagtcactccgaactccaatgattattacatccctagaatattaattagtgatgatgcttttgagcatttaattaagagatgggacggattccatgaaaaagattagacttgaactcgtatatttacgtgctattatatgtgcaattattattatcacacatttacttacacaaattactttaaaacatgaaaatatggagggtggatccttagtgttacaattttacattcgtaatattgtgatttttggtacaccttgctttattatcttgtcacagttactgacaaccttgaattaccaaaaagtcacctatagatacttaactacacgcgtaaaatatatacttattccttacatattaatgggattgttttacagttatagtgaatcattattaacagattcaagtttcaataaacaattcattgaaaatgtcctattaggtcaatggtatggctattttatcgttgttatcatgcaattctttattttgagttatatcatttttaaaattaactataacctattcaacagtaaaatattattattgttatcttttattttacagcaatcatttttatattactttacgaacaacacagcgtttcacgataccgtgctacactattatccattaagtgaaaatactataatattcggatggattttttatttcttcttaggtgcatatatgggttataactacgaacgtgtattaaatttcttagaacgttatttagttattatgattgtattagctgtagctacttattttgtgtttattgcgttagcaaatggagactattggaacgttaccagcttttcatattcattaacaccatataatagtattatgtttattgttatcttgggtatttgcacgcattttaaaacaatgttatttaatacgattcaaatgattagtgctttctcattctttatttatttattacatccaatcattctagactcattgtttgcatatacaaatatatttgaggataatacaatggtctttctagcgatatcactactattcattttaggattatgtataggtgtcggcatgatattgcgtgaattctatatctttaggtttattattggaaaacaaccatataaattgaacattaatgcttattaattattaagctatgttaaaaacacgcggtgggcgaaatcagtttgaattgactgacttcgttttaccgcgtgtttaatattgttatacatatattctaattgcacatttaaacttcgtaaatgccaatgggagtgggacagaaatgatattttcgcaaaatttatttcgtcgtcccaccccaacttgcacattattgtaacctgactttccgccagcttctatgttggggccccgccaacttgcacattattgtaagctgactttccgccagcttctttgttggggccccgccaacttgcattgtttgtagaatttcttttcgaaattctttatgttggggcctcgccaatgttttacttgaataattcttttagaattctaaataatgatccgattaattgaaagaagtctgcagtcattattaattcctccctttactttataaattatgcttgcttagtatcagtcagcttttcagttttcactaaatcgtctgctaaatgatgccaaaaatcttgtaattcttctcttgtgcgcactgtatcagaactgtcttgtcctacaaagtcaacatgatcccaatcatgttttgtaggcgtcacttgccaaatgcctttttgaattttatctgtcgcttttgtataagcttgattaaatggatgttgagaagaaataacggatactaaaccatcgttttctcgccattctttttcagtagctttaccgattaagttaccagtaatcacaaatgggaaaaacatatttaagtctgctttttgtctatcgctatttaatgctttgtgcgttgcttcaccagtgtatgttctatacacaatgttagggttcaacgacgttttacgatttaaatctgttgcaccctcacgcgtcagatcgtaaaatccattatcttttgatttccataaattagattgtttaacgcgtttgacataatcaatatatgattcatttggcttctgttttagaccccattgagccaacccgaagtctactcttgaatttttattaccaaacattttaccgatatcaaatacgatttgtctcactaaagcttcattaccagctaaatctgatgcgtgtgtaccattatgtggtgttcctaaagtagtaattgatgaaatcatattgtcatgattacctttgaatagtggagaaatttcgccaccatgtttcttttgatactctatttcttcacgattaccattacgcagtaattcttctagttgacgtatcgtttgaccgcccatactatgtccaactaggtgtaccttctgtcctggtttccagtctttgtaaattccttcgtatgtttttccataacgttcatgtccatattttgctgcatgtgctgcaccataatctacacgaccgcctttgatataataataaagttcaactgcgcggtcatagttacttccaaaagcacttatacttgcttcataagctttgtaaccattttcttctaaatcttggcgaatgttcattttattaccgccccaataatgagctaacactgaaggattaatatcatctgtaaacccattgaaaccatgcactaaaacgataggatcctgatttttatactgcccttgtttggcaactttattcgtttgatcatctttcgcttttgcagtaagttcctttgtccctttgtttggtaacgttgctactgcactactttttaataaatttaatccatttttcttgtcattgtcctttgttggttctactggtgatttttgattgttttttaaatctgaaactgatagtgttttttcgtctttttgaggtttcacttcttgttcattgttaaaattgtagttagtaattttatcattcgcttgattattttgttgtggttgtactttctctatttctgtctcattaacaatttctcgttgacttgtttgatctaacttatttaatgatggtgcttcctttattcgactttgtgaaggtagattgttattagcgtttgaatcttgactattatctgcctcttttgactgttgctgtgacgccactttactttgtttaccatcattaatagcctgttctaacccttgatttacatcgctaggattagcattgttattttttgttgtatcacgttgaatatttttattattaagcgatgattttttatcatcctttagttgatctttattcaaatcatctgttttacgatgattttcttctgatattgttttatcattatgcaagttcttagttaaattttcagtatgttgctgttcgtcaacaccgttttcacgttgataattagcattttccctagtttgttgatccccaatagattgtgctgtaactgtatcctcctgtgaatttcccatattcacttgcttctcagctgcttgtgcttgtccaccacttaaaaatagtaatgtagctattaaaatggaagatgcacctacactaaatttacgaatactatacttattttgacttttcatcattgtcagcacctctatttttttattttagataaacaaattgataattattcgaggaataaactcaaataatttacttaaccaagcactcataatgaccatcctttctattgtttaatttgacgagaaagcgtttacatttgtatttaaaaaatatattctccaaagagaatttaaagtgtatacgctaatcatttcaaattattaattaatattatatttggcaaaatttaattagtcaataattagacacaatttaattatgcaaattgtaacttttttacatatatcttttttgatttttaatatttacatgcttggggcttaattccaatgatgtattatttttttagattagctatatggggagatttatgagctattacagttattatgtttgctggtgtcgtattttaaacctaaaaatatcatcccatccacaataattgtatcaggataaaccgtaatacttgttcctaaactaaatatatacagttaattttcttccctcaaagtaagtatcctactatttttaatttattgtttaattactcttgaactacctttaacttaatctcgaatttatgatgattagcataaaaatacatcccataaagttagttttttagtctaactttcgggatgcatatcttagttctaatggagattgtcttttaaataggctatgacatttctatttcaggctagatatatttgtatttatagtataaatacaaagaatgtaaagacaactatgatattaataggtagtaacgacaaacataactctttagctttttcgccattttttcccttcataacttcattatatcgattcatatacttttcgacatctttaacagtgacatctattcctgagttgctcaatttactttttataattatttttgatttcgtattgtgattatccactacttatctataacgagttcgcaactttagtaccatcacagcattcatagttaaaatatgttggtgtcgtattttaaacttgaaaatgtcacgttttccacaatatttgtaagtgtataagccatgatccttttccttatatcttagtccatacttgctttaccactgttcgatattttgtcgttcacctttaaagttattgcgcttatgatgtctacgcgctaattccgcctcaatttctgaaaaatcgacgccaagcgcatgcatcaagacaaataaatgataaagttcatctgctacttcacttacaaatgcttttttgtcacctttaattgcttcaattacgacttcaaaagcttcttcaccgtatttttttgtaatcttttctataccttctgttaataaatattttgtatatgacttttcattattggattgggcactatcttgaactgtctgcgctaatgtttgcactgaaaatggaacttctgtgttgaaacaactttgactgcctgtatgacatgttggtccatttggtatgacatcaattaaaatagtgtcattgtcgcaatctacatgaatatctttaacacgttgcgtatgaccagatgtttcaccttttgtccatagccgttgtttcgaccgcgaatagaaacataccacaccatcttctatcgttttatcaaaagcttcttggttcatataacccaacatcaatacttgttttgtttgattatcttgtaaaattgctggcactaaacctttgctaaaatcaattttatatttggtcatcttactgctatacccccttgccgtatcacttctttaatagattgaaccgtcgtttctcgatcatgtaatatacttgcagctaaacctgcagaaacatccgtctgatcaaataattctacaaagtgttgtgcattgccaccaccaccagaagcaatgattggaatatttacaagagacttaatatttgctaggtgttcaatatcaaagccttgtttcataccatcatgtcccatacttgtaacgaggagctcacctgcacctaactgttctacttgctgtacccagtcatatactttaatatttgtcatttttttaccaccagtcgtacaacaataatgtgcttttctttcaggatcataatagctatcaattgctatgcagatgcattgtctaccgaatttatcactcgcttgtttaatgagctgtggattttttaaagcacttgaatttaatgatactttatctgcaccatgatttagcaattgggtaatatcatcgagactttgaatcccaccccctacagtaagagggataaacaagcgtgacgctgtctgttcaatcacttctagcattaagctatgaccctcttccgtcttagagatgtctaaaaatactaattcatcagcacccgcttcattgtaatacattgctaaatcaacaggattcccaatatcccttaatcctttaaattgaatccctttaacgacacgaccatctttgacatctaaacatggaatgatacgttttttaatcattttagcccctcccaaaaagatgcttgatgtgcagcctttcctataatagcagcgtgaacatttagcgacgctaatcgttgaatatcttgctgatgtctaataccaccggaagcaatgacaggaatcgtcgttgcctttactaattgaccagttaattcaaagttaggtccggacattttgccatctttagcaatatcagtatatataatgccgccaagaggtatatccgataaccgtctcacaaaactaaataaatttaactctgtgtcctcttcccatccgttcactttaatatcttctccataggcatcaacagataaataaatgcgacctggaaatgtatgtgccatctctttaagccaatcagtatcttgaatacctttcgttccaactatgcaataattaatccctgcggcaaagtagtccatgatttgtgacttcgtacgaatgccaccacctacttcaatatctttggttgttaatctcctcaatgacttaatataatcaaactctcgggcatgctgtgccttagcacctatcaagtcgacgatatgaatacgattcacacattcaaattgactatagtaagcaatactttcttcagccgagcgtgacattttttcttcactatcatatttaccctctgttaacctcacacttgttgacccaatcaaatcaatcgctggccataattcaatcatttataaatcccccttgtattgcctgacgcaaaatttgtaacccatatgtaccgcttttttcaggatggaattgaataccaatataattgttaaattgaacaattgccggaatatcagccccatactgcgcatatgcaattacattttctgacatcggcgcttgataagaatgtacgaaataaacatcttgatttaacatagggtgcttactcactaaattattccagcctaagtgtggcactgggtattctgtttggatacgcgaaatatttcctgggataaaccctaatccagatgcatcgccttcatcactatgctcatacattaattgcatgcctaaacaaataccaatcatcttcttatcagtattcttagccaatattgcattgagatttaatcgttttatctctgacatcgcatctttaaaatggccgacaccgggcaatatgattgtttctgcttgatcgattatttttgaggtatttgagacaaccacctcataccctaaatgttcaatagcgcgttttacattactaatattccctaatccataatcaacgatgacaatcattcaatcacacctttcgatgacggcacacgctgatcatcagttgcagttagcgctatgcctaatgcacgggaaaacgctttgaatatagcttcaatttcatggtgtgtattacctccacgaattaaatcaatatgcgttgttaatcttgcattgattacgaccgctctaaaaaattcttctactaactccgtatcaaacgtaccaactttttctttacttaatgatgcattgaatgataggtatgggcgcccacttatatccacaacgacacgtgctaatgtttcatccattggaatgtacatcgttccataacgaacgaaatgctttttatctttaatcatttcaagtaacaattggccaatgacaatgccgatatcttcagttacgtggtgatcatctacgtcaatatcaccttgtgcctcaatgtttaatgacagaccgctatgaaatgtaaacaaggttaacatatgatttaaaaagcccacacctgtattaatatgcgatggtgactgatcatcagatattgaaatatttagttgcgtttcagctgtgtttcgttgtttttgataaatcatattttgcactccattctttaacaatttcttctaattgctttaactgtgatgctgttgcaattgagtatcttacatagcccttcatcaccggctcatcataaaagcgaggtttaaatccttgttcatatacgtattgtcctaattgttgcgctgctgagcctttagtaagtacaaaattagcatttgatgggaacactgacattttatctgcaacatgtgtatcaaatatttgttttaactgctcagctaactgtcgttgcatcgttaaaaattgtcttgtctcttctctatgtctaaaaatataagtcgcaatatttagcgtaaatacatttaatggatatggatgttctattttttgaatatgctttatcgttccagcagtactaattaagacacctaatcttaagccggcaattccaaacgcctttgataatgtacgcattcttaagatgtgtggtgccagttccacgtcatatgccgtaccataatctaaatatgcttcatcaatgacaaagtatccgtttaatgctttcatcttatctgcaatagctgttaaaaatgccgtatcaaattgcttgcctgaagggttatgtggattactcataataaaaaatgatggttgtacttcatcgattttcgttaaaatggtttccaaatcaaacgttaaatctgatcctgcatctacaaatgcaatttcacgatttacttgtgccgcatatgcttgatacataaaaaaatcaggatttagcgttaatgccggaccttctggcatgatcagcattaacttttgaatcaattcatcagatccatttcctgcaataatttgttcaggcgataatccgtaaaacttagcataagcttccttgaattgttcatatgctgcatcaggatataaattatatggcgttgcactaataatagacgtcattgttttttcatccaacggcgtaactggactttcatttttatcaatataaatcatttcaattacactcccctaagactgacgtattaaaatagactgctggtgattgtataatgcttcaacatgagcaatatgttgtgctgaatcagcaatttgttcaaacgtatcttttgataaatggatgaccgtgttccgtgttaagaaatcattgaccgataacccattggtaaatctagctgttctatttgtaggtaatacatgacttggacctgcaacgtaatctcctatgacctctggcgaataatgtccaataaacaatgcacccacatatttcactttttcaatatatggttgaggatttactgtttgaatcgacgcatgttcaggcgcgattgtattcatgacatggcatgcttcatcaaaattactagcatggataaggtagtgttgattagcgatacttttagaaacaatgtcgtatctgtccacattaggcaatgctttagcaatacgtgattctaaatctttaaggacttgcgcatcttcactaatggcatatgtacgtgctaattcatcatgttctgcttgtgcaaaaacatcatatacgatggcatctaaatctgctgtttcatcaataataagtgctatttctgttggtccagctatttggtcaatacctacttgtccaaataaatatttcttggcatatgcaacaaattgattgcctggacctacaatcttatcaactttaggtatcgtttctgtgccataagttaacgcagcaatactttgagcaccaccaacttgaaatacttgatcaacttgcgtaatatagcatgctgctaatacttcttgagacacaccattaggttgaggtggtgtcacaacgacaatattttccacacctgctacttgtgctaacgtcgctgtcattaataccgttgaaggataacttgctttaccaccaggcacataaataccgacactttctagtggatggtatatttcataacactccactgattcttctaactgttgattcgtctgtttaatactttcttgatatgctttaattctttcataactttgttgtaatgcttgttttgttttttcatctaatgtgtcaaatgctgctttaatttgttcatgactaatttctaaatgatctgttttcgtatgatcgaatgttagattatacattttcaaagccttatctccatgaactttaacttcctgacaaatatcgcgaataattggatacaatgactcatctaatggtgcttctaatgaaaattgatttaaaaattgttgtgcattaagcattggcaatagacacctccaaagagcgaataaattgctctattaattgtgattttttaaaataagctgctttattagttattaatcttgcattgatatcactaatatgttgcttttcaaccagtccgttcgcttttagcgtagtacctgtttgaacgatgtcgacaattccgtctaccatatctacaacacaggccaattcaacagagccattcaatttaatcaattcgacatcaataccttttgatttaaaatatgtttcagcagtatgaacataactcgttgcgattttacgataattggtcgtttcaggtttcgctgcaaccgcaaaatgacatgctccaaaaggcatattcaacaaattattaacattatattggcgctcatctaatatgtcgctaccaacaatgcctatgtctgccattccttgttccacatagattggcacgtcacttccttttactaaaatgcattcaatattatctacacttaataataattggcgttctctattttttaatgtttctgataatgtcgtatattcaattacatctaaatagttaattaaactatccattagacgtcctttggctatggcgattcttaacattgtgcatactcccttacttaaagtgttaatcctaatccaaacccttcgatgcttcctttgtaataaccacctgttaaaactcgagattcattttcagcaaaatgacattgaataaataaacctgtgtaataggatctaggtggctgcgcagtaatatctaaatggatgtctttgtaaccttgtttatgtaaccaacgttcccatatttttaattcaacgagtgctggatggtcatttggaatatagtgttccaatacatttaattgttgttgcgtattctctttcaagatttgcacgattggatgttcagtcgacaaatatgtaaccagtcccgataaattacgttcctcaatcattgatagtatgtctggtgtttgtaacgatttatcgagtaaggcatcaagcaattgataatgtcccaatacaacaaaatgcacgttgtctctcaactgctgttgaataaactgaataaagagctttaagctctgttgcacattcgctaatgatggtgcatagttttccaaaccaacttgtacagccgcttcattattccgaatgattaaacctgtgtatgccacttttgttgctgcagttggatacattgagtaataacgcaataattgatctgtaaaatcatttcgaagtgcataaatttgatgctcatgttgccaaaaatttcgctcacccatctgctgcaaatcctcatggttcaattgtttccagtccaacttttcaaccacactaaaatcaactaactcataatccgctttattaaaatattttaaaaatgctgtttccgattcttttaacgcaattaattgttctgaattattcactcgaccaccctttactttcaatactgtatttaaaatcacttggtattttcgttgtttgctttacttctctaccacgctaaagtgtaatatgattaataacttatcatttttagcaatacattacaacctttttcagaaaattcggtgtattgattttaaaattttttaaaataaaaaaggcaagacatttgtgcctataaaaatgcttaaccaagatttttatattgaagttgtacttcttgcacatattgtccttgccttattatgtaaagttattttctttctatctttttattaaatttaactattcttcataatcccgattccctttaaagtaacgtctatcttgtttactatatacattttcaggattaaaaaacggtttgagtttatatttaaattcaaataagtttagaccatcaatcgcaaccctatcttggtaaacgttcgttgctgatatatctgtaaaattgtttggaccgacacctgcaataaacttaaactctgcttcatctaccaaataatcatacgcttgtgtatgtctatcctgtgcgccatgtggaaatacaaacatatctgttttacctacaattggttcaacttcatctttccatcttttagtatcacgtttaataccttctaaagatgttttttcaaaattaatgtgaccatatgaatgactcgcaaatgaccatccatcccgtttcattgcgcgaacaacttcctcatctgcctttttattctttgtataatctttactcgttaattcattcgtgcgataacctaatacgccctcataaccggttaaagcaacaacacctttttcaccatttaaagaaaaatctggatgctcttttacaaatttatttaaaattggcacgatatcattgtcatcagaataagtagcatggccttttttgtctgtagtttcagaaacaacatgtttatttttatcgagtactaaacggtcagcataaccatggtgtctcatgtaactatagtaattcatatcatcaattgagatgattagtggctttttacctttcggcaattttatttttttggcttttacatgatgagatgataagtcgtatacatcatgtggattaacgatgatgtaattatttttatataattcgttcaatgattttttaaattcacttacagtaatcatccaatcattgttgcccttagcttggtgtgtatctcctgtaaacgcaacttttgggtctgtaattaatgggtgataaaacacatgataaacttggccgtgatatgtttcccaatgttcatccattttcgatttatgctttgcatactcatttggattaacagatttattttgagctttctcattttgcttggaacagctatataacaatgcaactgataataacagaaaaaatagcaataaatattttttatgcattaaacattctccctatgttttattatgcacaattataacatttttattatgtggctcataactttttaagaaactgttgggattttaattttattttttagataatgtcatagtattttatttataaaacacaatatctccttgattgataatgtcgtccatagtatcgtctcgcttgaatttaagcctttctgctaaatttattgaacgttggttacacttatttgtcctgataacttttactgtttcttgatcgatataattcacaaaatttgtgattgctgtaatagcctcacatgcgtacccttgtccttcaaaacttggatgtaatttataaaataaatttaatactgtttcttgctttaattgtcgatattcatatccacaaataccaataacactacaatctattttttttaccaatacaaagtaaccaaattgatattgttgccaatggtttcgccatttttcaatccaccgttgtgtgtctaatttggaattatgtaaacctttgggagtgtatatatttgcttgtggatgactacaaatattataaagttcaattaaatgcgaggaacttggaatcattaaatttaatctttcagtatttatcattaaatgtctccctcctatttctatttaaagactatttatatgaatactaataccacgggttgaaatatcgactattatttaaaaagaataatgtaactactaacatcagaagtattaacgtcaaacacaaaacaacataatcatctttttttaattgttttttgacgtaccaggttctccttttatactgtccgaattgtcttaactccatagcagtactaatagtgtcaattctttcgatactagaaaatattaaaggtaacacaatgcgtttgatacctttaacacggctagtaaattttgcttttttcgaattatcatatcctcttgcttgttgcgcttgtgaaatattaaaatatgtttcttgaatatctggaatataccttaatgctagtgagactgcgtaactgattttataattcacacctagctgatttaaacttgcagcaaaatgactcggattcgttgtgaataaaaatattaacgctaaaggaactgtactaatatattttaatattagattaaaaagatagaataattcctgtgatgttagcgtaaatcgaccaataccattgactaactctgtacgctgattataaatcttcacaccatattcagggtcaaatatgtacactgcaataatatttaatattgtgaaaaacagaatgaatttaacaacaaagcgaacttgtttccattcaatatgagcatatttgaccaataaaatagatgaagaactaattaaaattaaatatcttgtgtcataagtcaccattgcagaaatagaaacaactaataagaataaaagtttaacagtcgcatttaattgatgaatacgactatttcccgggtgaaaacctatagtattatattgattcattggcgtctcaccttcctatcatggttaataaataattgtactaatttctgtggctcgctaatccctatatattcggccatttcaaatagcgatgtttgtctcaatgatgcaatctcacagatttttttatcatttaaaaccaatactggcgtggtatcagcaacgacttgaccttttgataatacaactgttcttgaactatactcagacaataaatgcatatcatgcgtaatcataataatcgtcttcccctgtctgtttagttcaattaaaaatgacattatctcattataatgatagaaatcttgaccagcagtcggttcatccaatatgattatttccggatttaagactaaaacagatgctatagtgaccctctttttttgaccatagcttaaagctgcaattggccaattccgaaatgcataaagtccgcatattttgagcacattctctactcgtatctttatatctgattctttcatacctcgtgctcttaaccctaatgctacttcatcgtaaatcattttttcagaaatcatatgatttggattttgcatcacataacctacgaattcagatcgttcgctaattgacaattgattaaatcccctattacaaaattggatattacctgttatatctaaaaatccacaaattgctttagcaagtgttgatttgccggcaccattgtgaccaactatactaagcatttctcttctataaacatttaattgaacattattaagtacactattactatagtcactatattgaacacatacctcatttaattctaatagcggttcagatttgtacttattatcattatttgcagatgtttcatctatccattttttcactttaaatttaacatgttcactcatacaaacgtcacgtaaattcgctaagttatcaatggattcgacatctacttctgcatatttaagcgctgtacagtataatggttcacgtatgcctgcttctttaagcttagatgattttagcaaatcactaggcgttgtattagcgatgatttttccatctttaaaaagaagaactctatcaaacgtatcatctaatgattcttctaatcgatgttcgacaataatcatcgttgactttgtttcttcatgaatattgtttaacaatctcagcgtttcatgtcctgtcgcaggatctaaattggccagtggctcatccaatattaaaataggcgtacgatggattaatataccacctaatgaaacgcgttgtttttgacctccagataaatcttgcggtcggtgatttaaatgttctatcatgccaactttttcagcccaataacttacatttttcttcatatcatcttgttcaacacaattattttctaataaaaaggccatatcttcagctgctgttaagcctatgaactgtccatctgtatcttttaaaactgtaccaacaacattagatctatcatgtaaacaactaacggttgcatcttgattatttatatatagttccccagttatgttacctttagttttaaatggaattaatccgtttatgcaatttgcaaaagtcgatttaccactacccgaagcaccaactactaatactttttctcctggataaatatcaacatttatattctgtaatgtaggtgttgcttgactatgatattgaaaactaaagtctttgaacgagataattggttcagtcatgatatatcattacctttctatattcatttacatatctgattcaacaaaataactattccttacgtaaactaccttttttaatttgagatgaagcatatgcttttaataatattgtcccaataatgccaactgaaataatatttaatactgcagagataacaccttgtgtataaaccttgttagctggttcgttataaatcaaaatatctaatgttggtgcaataagtgcccagcaaataatattcgcaataatttgaccgatattaaaataaaccatcgatttcctagaaaatcggcctgaagaaagatttaattttagtccaatccagccatataaacagcctataattcccgagcaaataacccaactccaccaggcactaccgtatgtcgtaaaatctttaatagcatgtccaactaatccagtcattaaaccagcaaaaggtccaaatattgcagatattaatgctaaaaatgcatatgatgtttctatattcgtattaggaaaacctgttggtattacaacaaaacgccctaaaattacaaataccgctgctcctataccaattgcaacaacagttttaactgaaatatcttgttttttcatcttcattactccttacataaaaaattcattatattgatggtgctttagataaatgaatcgtccaatcatttccagtaccaatatgatataaatctgaaaatgagtcttgattgactgctacaccaatatttactagcgagttaacatacacaagaggttcacccacattaacatctgcaaacgatcgcgcaaatttaataatattttgatagactttcttatcttgatgataaattgttaccaccaaattattaccatgaacaatttccaaggattttaagaatgccaatggaatatttgtccataatgacccaaatctgatatctaaaatatcaatgcttcctgtaacagaatcctcattttttgtcacttctcttatttctaatgcctcaatactatcaacattaattgcctgaccgagacgttcaaacgctatcttatttgcagctaatctcgcaccattgtatgcataaacatctctaccatgaaaagtatgactttcttccgaatgaggcaatcggcttttcacttcatcaatttcgataacttttttaataccttcgtaatgtttaatatgacttaaagaaccattatcaggtgtaataatgtaatgacctgaatatgttaagcaagcaatgctccgcctatcactacctacacccgggtctaccactgatacaaaaactgtgcctttaggccagtattttacagtttgatataaacgatatgacgctacccaaatgtcatacggtggtatatcatgcgttaagttttcaacacgtatatcatcacttacagtatatgcaactccatacattgcacttacagcgccatcactaagtccaaaatctgattgcaataccaaataatttcccataaaatgcctcctttttttaaaacttcaaaaaaatattatctacatatttaatgttctatattttgaattttcagaattatattaaaatagtacgagtcacttgatgcaaagtcaatagtagtgactataaaaatgataataatagtcagatttatctcattaactaaatttcacggacttgtaatcacttctttatgtttgaattaattgactagggtataacaatagtgtggtgttttataggtcattctttaaatacatcacagaaaatattcgaattcgaaataaaatgcttgcatctttgttttttaggtggtattgtatgtatatcaagtataaaaaatatatctaagagataaaaatatggaggttttatattatgactaactttacttttgatggtgcacacagtagtttagaattccaaattaaacatttaatggtttctaaagtgaaaggttcatttgatcaatttgatgtagctgttgaaggagatattaatgacttcagtactttgaaagctactgcaacaattattccaagctcaattaacactaaaaacgaagcacgtgataaccacttaaaatctggtgatttctttggtactgacgaatttgataaaattacatttgtgacaaaatcagtatctgaaagcaaagttgttggtgatttaacaattaaaggcatcactaacgaagaaacattcgatgttgaattcaacggagtaagtaagaatcctatggatggttctcaagtaacaggtattattgttactggtacaatcaatagagaaaaatatggcattaactttaaccaagcacttgaaactggtggcgtaatgctaggcaaagatgttaaattcgaagcatcagctgaattctcaatctcagaataatctcattacacaatcctcattgttttaatatatatacgaaatgccaactatatcatccctaggtatagttggcatttttcgtttaactcatgtgtaacaagcactaactgttcaccctaattttagacgcctttcattcaggtaggtcttattgaaactgaaaactttgatgaccttttgcaaagccattaactgtataaagcatagatcctccgcccatttctatatcattggaacaaatgatgagttgatttgttccaggtataaattgcggatgagtagaacgtaacatatgcccttcatctcggcctggtatcaatatttgtcctattggataaccccttttattaaaaactaacactcgaccttgaccatacattgctacgtataaattatcgtcactatcaatacaacatgagtctggtccttcatgacctgtaaaatagtacggtatggtagctccaaatggttgtatcgtcacaccatcatcttcaagtgcaatgcgatgtaatcgattggctgttgtttctgttacccatagtactttttcatctgtacttaaagcaataccatttgctacgctaatattttgaatgataggcgtcactgttctaaagtccggcgaaacataataaacgcctcctagtggattggtagagtatcctctaaaatctgtaaaataaaatccacctttagaatcaaataccatgtcatcaatacaatatgctgttgaaagatcttcaataatatcttgtaagttgtcaccattttctgtagctgcaaaaatgcctcctgtagatttaaaatctcctaaataacaaacgaataatcggccatctttatgtattttgattgctgcaggattcgctttgtgacttacaaaaggtcgtttgatttccttcgtttcaggattgattttgaaaatattgccttcgaatacatccaataaaaagagttgtccctgccgatcaaagttcaatccttctagttgcaatccttttttggaaatttcaagccatggttcagctgtaattgtttgtaattcactttcagatataattggaacagcactattggacttcccgctataaaataatgtaggtaaatcttgttgtgacatcatgatcattcctttcatttcattcgttttaactatcaattttattttaaacaagataactatcaaataaaatgataacggtttcatctatctattttatcggtctagtggctgatttcaagctagaaatattgaatgacaatacaactctgttaaaatgatggacgtagacaaatatgcgtattgacgctttattttaaaaattaacatgcttataacatgtttatagaaggagattaacctatgaactatcaagttcttttatattataaatatatgacgattgatgaccctgaacagtttgctcaggatcacttagccttttgtaaagcacaccatttaaaaggtagaattcttgtttctacagaaggtattaacggcacattatctggtacaaaagaagaaaccgaacaatatatggcacatatgcatgccgatgaacgattcaaagatatggtgtttaaaattgatgaagctgaaggacatgcttttaagaaaatgcatgtacgtcctcgaaaagaaatcgttgctttagatttagaagatgacgtcgatccaagacacacaactggccaatatttatcacctgtagaatttagaaaagctcttgaagatgatgacacagtcattattgatgcacgtaatgattatgaatttgatttaggtcatttccgaggtgcaattcgtccaaatatcacacgttttagagatttgcctgactggattaaagagaataaagcgttatttgcagataaaaaagtggttacgtactgtactggtggcattcgatgcgaaaaattttctggatggcttttaaaagaaggtttcgaagatgtagctcaacttcatggcggtattgctacatatggtaaagatcctgaaacaaaaggtgaatattgggacggtaaaatgtacgtatttgatgaccgtatcagtgttgatatcaaccaagttgaaaaaacaattattggtaaggattggtttgatggcaaaccatgtgaacgttatattaattgcgctaacccagaatgtaataaacaaatattagtttctgaagaaaacgaaactaaatatttaggtgcatgctcttatgaatgtgctaaacatgagcgtaatcgttatgttcaagcaaataatattagtgataatgagtggcaacaacgtttaacaaactttgatgatttacatcaacatgcttagttttaattaaatacctttcaaaacacgctttgaaaatccgatttataaaggtttttcaaggctgttttttatgcgcatacataacctgatatgtttttaattatgcgcgtgttatactaaattaaattttaatactgcggggtgtcttaaaatgcacattttagtaacagggtttgcgccttttgacaatcaaaatatcaatccctcatgggaagctgtgactcaactagaagatattattggcacacatacaatcgataaattaaaactaccaacctcttttaagaaagtagataatattataaataaaacgttggcatctaatcattatgatgttgtactagctataggacaagctggtggtagaaatgccattaccccagaacgtgtcgccattaatattgatgatgcacgtattccagataatgatgattttcaacctattgatcaagccattcacttagacggtgcgccagcttatttttcaaatttaccagttaaagcaatgactcaaagtattattaatcaaggacttcctggagcactttcaaatagcgcaggtacatttgtttgtaatcacacactttatcacttaggttatttacaagataagcattaccctcacctacgattcggatttattcatgtgccatacataccagagcaggtcattggtaaacccgatacaccatctatgccattagaaaagatagttgcaggtttgactgcagccattgaagctatttctaatgatgaggatttacacctagccctgggcacaacggaatagttataagtgcacaaatcaaaaccacccgtgtgaacgggtggattgttctgcggctataasccttccttactggccagccctaaaagggcactgacaagtcacccaactgcactactattccagcaaccctaaagggttactcttttttctttctttttttatttttctctccagtgaaaggatctaaatattcttccattgagatttggtctgcaacgatatcctcttgtaattgattacgaatataattttcaatcacttttttatttctacctactgtatccacataaaatcctttacaccaagaactttctatttccatatctatactttaagttagcatgtctatcaaatatcattaaactacttgttccttttaaatagccaacaaatgatgataccccaagtttgggtggtatactaactaacatatggatatgatctttacatgcctctgcttcaattatctctacaccttttctttcacataattgacgcaatataatccctatatctttttttatttttccatatatcacttgtcttctgtatttaggtgcaaagacaatatgatacttacaattccattttgtatgtgctaaactgtttgtgtcagatgacattaaatagcatctcctcgtgttgattattttggttggctgaccaatatttattctagcacgtagagatgcattttttgtgacaatggtagaaccttttctgaaccatacgcatagcgtatggttttctttttacaaaaacaaaagcaccctaatttgttagtttaagtctaactttagggtgcttttggatgattggtatacagttttactataatgatgtattttagctaaacgacattgtttagtcttctttttttaacttcctaaaatttacaaatgtataaataataaatgctatatttagaatgatgagtatacttactgaaactaaattaaaagtgtctggttctttactaaagatagctgctatccttgctatcaaacttggcaatgaaattaccaacacgatgagcgcataaattttctgtttaattaaaatacaagttccaatgagcgcaattaaaagtactaacccaacgatgaaactctgtttgtcacttaactcaaagaaactatagataggatattttttaataatcaagccacctaaaatcatccataaaaatacgataattccataagtcacatttataacatacgttattttttggtcaccaaatcggactaatgtatttcgtagaatcagcataccaatgacaacacctaaaataacgatactagctatataaagtaaaaatgcaattgtcacatcaaatgtacccaaatctaaaaacctaggaattataatgactgctaaaataaaagcgaagtacaaagtaatatatttatacaaaccggtagtaagacttatctcaggtgataattgatcagccattgacttaatcggtgtattaataattgaacttgtatcttcgttatttttttcagccatagttaaatgatcttcgagctcttccaataactcttctacttctgcttcagtcttacctctaaataacaattcaacacgtaatttttctaaaaaatcttgagattgtttacttaacatcgttttcccctccaaacaagttaatcatccctttattcaaaacttgccatttcgatttaaatacttttagttcctttaaacctgaatcggtaatcgtatagtatttccgcctcgggccgccattactagatttttttattgtcgtatcaacgtatccttttttgtttaaacgcattaaaactggataaatactaccctcacttatctctggaaactcttgattcttaagtttcgtcataatttcatatccatacgtttcgccttgggcaatgagacctaatatcgccccatctaagagacctttcataatctgatctgacactgacattttaatcacctactatcttacataataagatagtacattgagaacttttcgtcaactatcttttattgtaaggtagttgttgtacacattccttaaatgactaacaactttgttaatagggtaatacttacggaagtatattttatttatgggggaggaattaataatgactacaaaaacagtatttgatgtcattgatatggggttaggatatttagtaaatgtgtatgatgcttggaaagttgaaaaggtacttgatgattatcataagcctttttctaataccattcattggcaatttggtcatgtattaacaatttttgaatcggccttagctgttgctggtaaagagaatattgatttaaatatctatagacctttattcggaaatggttcgtctccagatgaatggaaggatgaagtaccgagtattgaaaggattttagaaggtctccaaactttacctgaacgtgcacgaaatctaactgaagatgatttagcaattgaattgaaacagccaattgtcggttgtaataacttagaagagttattagtattaaatgccattcacatcccacttcatgctggtaaaattgaagagatgtctcgtatattaaaaaatttaaaataaatatgtgcttattaaccgttaacaacacgttaacgggttttttatttgtttaaaaggtcacttttttgaatttaataaacaccatctataccagttcttcaccgattctcgaaaaataattatattaatgatttcgttaatttaattttatatttaattattactgtacatcttttgtagttagctttattcttaaattgaaatatgtataaaacatagaaagaaggacgttttaacatggaaaacacggttaaatatcgtaagtttatactccctatcgttgtaggtctccttatttgggcacttacaccttttaaaccggatgctgtggatccaacagcatggtatatgttcgcaatattcgtcgcgacaatcattgcttgtattacacaaccgatgccaattggggccgtctctataattggatttacaatcatggtactcgttggcattgttgacatgaaaacggctgtcgctggttttggtaataatagcatttggttaattgctatggcatttttcatttcgagaggatttgtgaaaacaggtcttggtagacgtatcgcacttcatttcgtcaaattatttggtaaaaaaacattaggattagcatattctatcgtcggtgtagatttaattctagcgcctgctacaccaagtaataccgcgcgtgctggtggaatcatgttcccaattatcaaatcactttctgaatcatttggttcgaaaccgaaagacggatcagcacgcaaaatgggtgcatttcttgttttcacagaattccaaggtaatttaattactgcggctatgtttttaactgcaatggccggtaacccccttgcacaaaatttagcatctagcacatctaatgttcacattacatggatgaattggtttctagctgctttagttcctggacttgtttccttaattgttgtaccttttattatttataaaatttatccaccaactgttaaagaaacaccaaatgctaagagttgggctgaaaatgaattagcgactatgggtaaaatcgctttagctgaaaaatttatgattggtatttttgtcgttgcgttaacactatggattgtcggaagtttcattcatattgatgcaactttaacggcctttattgcgctagcattgttattattgacaggcgtcttaacatggcaagacattttaaacgaaacaggtgcttggaacacattagtatggttctcagtattagtgttaatggccgaccaattaaacaagcttggatttattccttggttaagtaaatccattgctacaagtcttggtggcttaagctggcctatagtcctggtcattttaatattgttctacttctattcacattacttatttgcaagttctacagcacatatcagtgcgatgtatgcagcattactaggcgttgccatcgcagccggtgcaccaccattattcagtgcattaatgttaggtttcttcggtaacctattagcttcaacaacacactatagtagtggtccagcgccgattctattctcttcaggttacgtgactcaaaaacgttggtggacaatgaacttaatattaggtttcgtctactttattatctggattggtttaggatcactttggatgaaagtaattggtatattttaaaatatttaaattagcgctcgaatctcattgatttgggcgctttttaatttgtatttaaaatcaacctttgctaaatcaagactccctttttaaaatacgtttatcctttaaatcattgcgtgcttcactgaaaatttgtataaagatttaagtcattacgtaacatcacataaaatacatttctatactattccgcttcattgattaacattacgtatgccctcataaatcatcatacaaaaaacaccttcgtttaaattcattttaattgcgaattcaacgaaagtgccttatttcatatttaatgtttcaaatttatacgtctgtcactgttactgcacacatacctcagtctcacctcatcatgacacaaaggatattgaaaacacgtataattatctttcctcgtattttatagggtttttgcgaccggatgtttcttcaatttaatgtattgagaaagactatataacacaatacctgtccaaataaatataaacgtaattaattgatctatactaaaaggctctttgaaaacaaatatgccgagtacaaacattattgttggtccaacgtattgaataaatcctattagcgaaagtggaatacgttttgccccggctgagaataggattagtggtattgccgtaatagcaccagaaaataacaaccaaaatgatgacatgttcaatccaaatgacatctgatgttgctgccataaataaataacgtatattagtccagcaggtgcggtaacaatacattcaatcgtaatactgctgatggcatcaatatgtactacttttttcaataatccgtatgtaccaaaggataacgctaatataatagagacgattgggaattctccaatcttgagcgtcatatataatacaccgatgaatgcgaataaaatggctagccattcaaatttattgaatctttcttttaaaaagataagtgcgagcaaaatgctaacaagtggatttatataataacctaaacttgtttgtaggacgtgaccgttcgttacagcccaaataaatgtaccccaatttaatgtaatgacatagcctgctacgacaatcgctaatagctgaatgggcttgcctaacaattgattcatatctcgttgaaatgcattgcgttgtttttgtccaaccgcgagtatgaaaatcatgaatattgctgaaaatataatacgaaaggctaaaatttcaaatgcgcctattgcatcaacgaactgccaatatataggtagtattccccacagaatgtatgcactgagtgctaaaaatatgccttttttatactctgaattcaccttcaaacctccttactttcctaatttttaatttactgcatacgctcacttggttatgctaatataacgattttactaataatatttcgataaagatatcattttgtttatatttcccacatttattcaccaaccactaaacaatattaattttataaataattctgtacaaatcagggtatattgccagaaagactaccatacaacataaaggatggatacaaatgactttacctaaaattggaaagcctgcaacacgcgcgctaaattcacaaggtatatacacattagaagcagtatcacaatatacgaagtcatctctaatggagatgcatggcgttggtcctaaagctatatcaatattggaacaagctttatttcagcaccaactacattttaaaacggaagttcagtcatcattaccttttaagttaacaggagatgtgtcatgcaatcatgcgcctaaacgtcaacaaatgatagattttatagttgttacagcagcattagatattgaattattacgttcactggttacaacagaatttatttggtctgtccctggccgctttgacatatacggacctcaaatattaattcaagaactatctaatcattacaatcaggttgctagtctcaatatccattccagcatcacacatgggtgcttaggttccatgcatggtattgaaatattaaaaactggtaaagagattcattttgctcatttttttgaatttgaaaatcataaaaaggatgccaagttaagcaaagtgacatcttacattgttgttggttaatttatcaaattatatatatcgcaaaaaatcttttgtggttacatgtatatttttatataacaaataatttggcataacatttttgttatatgaacacttattactagagtgcccattgaacatacagtatgattaaatatcatgttatgaaagaaggatatattttgactgtttttaaaaatgagcgcttaagctggttaccatacatagctattgtcattttgttacacgttattgggtttagttttttatggattgctggaaaagaccatcatatcttatttggtatggggattcttgcatatacattaggtttgcgtcatgcatttgatgcagatcacattgctgcaatagataatacggttcgcaaattattacagcaacgcaaagatccatctggtgtgggtttctatttttcaattggacattcatctgtcgtatttttaatggctgtttttttaggggtatctgtaaaatgggctaaagatgaattaccgcatttccaagatattggtggaacgattggtacactagtttcaggtttctttttagtgcttatcggtgtgttgaatctaattattttaatctctttaattaacttgttcgctaaattacgtcgtgaacacattgaagaagctgaagtcgatgcattacttgaatctagaggattggtttctcgatttgtaggaccttatttcaaattaatcacgcgtagttggcacgtattgccacttggctttttatttggacttggttttgatacagctagtgaaattgcgttactcgctctttcttcaggcgcatcacaacaagccatttcatttatcggaatcttatctttaccaattttattcgcatcaggtatgagtttattggatacattagatggtgttgtaatgaagtatgcctataattgggcattcttcaatcctattcgcaaaatctattacaatataacgattactgcgatatcagtcatggcagcattagtgattgggatgattgaattgctacaaattcttgctgataagttagatttacatggtgcgttttgggcattcattggttcgatcgaatttgattatttaggctatattttagttgcattatttttaattacttggcttatttcaagtttaatttggaagtttggtcgcatagaacacaaatggtctagataaggcaacttgtcttgcaactacctttgtattgttgcatttttagacaccctgcacacttcttccattatgctacgctctcagtagtcatctttaaatcgtttcttttagagatgacttcattttgagagcgtatttttctatttaaaatgtatttatccaaaattcaatgctttcgaatttaaaatttcagtatttctgtttaaaatttaattataatctttaatacaggaggcgctatgcttatgaatattgcgaagttagagaattatttacaaattgattcatctcgttataatcgaccgagtattgaagcattaaattattatgcaacacgttttatgttaactgtaccttttgaaaatattgatgttcaaaatagtaagccgatatctataaatatcgatgcactttttaataaaattgttcatgataaacgtggtggtttttgttatgaattaaatacatttttcaaagcctatttacaacaaaaaggatttaatcctgaattaatgtcagctactattcacacacccggtggcggtcgtagtctgaacggttcacatgcttcacttgttgtttctataaatgatgtattctatgtaactgatgttggctttggagacttacctctacatgccattcctattacttcatctgagcatacacaaccaattactgatatcagtggtacattccgcgctatttttaacaacgaagacaaggatattttctatgttcaaaaattcgaaaatgatcattggcatacaaaatatgaagctgaattcaaacctaaacaaatagaagattttaatagcaacatcgaatataatcaaacgcatccagattcaatatttgtacagcatttattaattacaatgccacaatcatttggccgtgctacaatgtctgaaaatcatttaactttaacaaggaatggtagctcagaaaaatttgatgtcactaaagataactataaacattttttagaaaaatattttggactaaatgtaactattaatcgtattgaaaaacaataatagtaaaatataaaaatatgggcgtatcttacttattgtaggtagcgccccttttttatgcttcataaacacaacaaaaaggatatgacacaaacttcatgtcacacccttcttttgaaccgcttcattttacttaagcaagtgcatctacaacataaatgacacctacgaatacaaatgcaatagcaatcatcgtcgaaataaagacgatacccattaatggattaaataataaaatgacaccgaaaacaatacctaataaattaaaaatcactgaaattagttttaagctaccactacccgaaaacgtaaataatccagagatagaactaaaaataaaccaaaaagcaaacatataaataaagaatgctgaacttgcgccaacattaaaaataactaatagaccaaatagaatatctacaatccccataaacagaatccaattttggttaccacctactaaagcttttgcttttctacggtaaacgatttgaatcacaccgttaattaatacaaacagtccaatcaaccaggtaatagcataaaaattttcaattggaaatgtaaaaataacgactgccaacattaataataatacacccattattaaactagaccatttaataccttgatttcctttttccataacaatcaattcctttcaaataaaaccctcttttaatttttacaaaaaatttattatacaataattaaattcccttttctcaatttacacaaacatcatcacttagaaagcaccattgcttttgtctaatatgtacgatgaatctgtatcctcactcaaaaatctactaagtagcgatagctttcaactctgtaaggttcattcattgaattgtaagtttagataaaggctactactccaaacattatttaaaatgaaattaaatacaaaaggagtgagactatgacgatattatcagtgcaacatgtttcaaaaacatacggtaaaaagcacacatttcaagcacttaaagatattaactttgacatacaaaaaggcgaattcgttgcgattatggggccttctggatcaggtaagacaaccttattaaatgtactaagttcaattgaccaaatttctagcggtagcgtgattgctaacggacaagagcttaataaacttaatcaaaaagcacttgccaaattccgcaaagaatcattaggtttcatcttccaagattacagtattctgccgacattaaccgttaaagaaaacattatgttacctttatctgttcaaaaaatgtcgaaggcaacaatggaagaaaattataaagcgatcacgacagcattaggtatttatgacctaggaaataaataccctagcgaattatctggtggtcaacaacaaagaactgcagcagcgagagcatttgttcacaaaccacaaatcatatttgcagatgagccaacaggcgcactcgactcgaaaagtgcaaatgacctattacaacgtttggaagaaatgaataaatcgtttgatacaactattgtcatggttacacatgatccggttgcagcaagttttgcagaacgtgtcatcatgctaaaagatggccaaattcatacacaactttatcaggaaggacgttctaaacaggccttttatgaagacattgtacatcttcaatcagtattaggtggtgtctcaaatgacatttaaccatatcgttttcaaaaacttacgacaaaacttaaaacattatgcaatgtatttattttcattattttttagcatcgtcttatatttcagttttacaaccttacagtttactaaaggtgtaaataatgacgactcgatggccatcattaagaaaggtgctttagtcggatcaatatttttatttatcattattgtcatctttttaatgtatgccaatcatttattcgtaaaacgccgtacacgtgaatttgcgctatttcagttgattggtttaacacgacaaaacattttgaaaatgttagcacttgaacaaatgatcgtatttttaatcacaggtgttgtcggtgtattatgtggcattgcaggtgcacaattattgctttccatagtatctaaattgatgtcgttatcgattaacttatcgatacatttcgaacctatggcccttgttttaactattttcatgctaattattgcgtatgtactgattttatttaaaagtgctttatttctaaaaagacgtagtatcttatcaatgatgaaagattcaattaaaactgatgccacaactgctaaagtaacgactgcagaggttatttcaggcgtattaggtattgctatgattgcactaggctattatatggcgacagaaatgtttggtacgttcaaagcactaactatggctatgacatcaccgtttatcattttatttttaacggttgtaggcgcctatttattcttcagaagttccgtgtcacttatttttaaaacattgaaaaaatcaaaaaatggacgcgtatctattaccgatgttgtattcacatcgtctattatgtacagaatgaagaaaaatgccatgtctttaactatcattgcaattatttctgcagttacagtaactgtattgtgttttgcggcattatctaaatcaaatacagatcaaacccttacatctatggcaccaaatgaatttaacgtggtcgctactcaagatgctaaacaatttgaaactaaactaagccaacaacaaattacattttctaaaaatgcttacgaaactattactgtagataatgttaatgatcaggttattactttggaaaatggtagtgattcaggtcgcacgaattctattttaagtgcaaataacaagttaacaggcaacaatgccatcattacaaatacaaaatcgctgcctaacattattaatatccatttaaacaaagatttagtagtaaaaggtactaagaatgaaactttccgtgttacacaagaagacaaaggtaaggtttatcctttaaatctaagcttcaactcacctgtcatcgaagtaagtcctgaaaagtatcagcagttgaaaacacaaaataacgttcatactttttatggatatgatattaaacaaacatcacaaaaggaaaaagctcaagcaattgcaaaacagtttggagacaaagtcatcacgtatgatgaaatgaaaaaagaggtcgatgctactaacggtattctaatatttgttacatcatttttaggattagcatttttagtagcagctggatgtattatttatattaaacaaatggatgaaactgaggatgaactaagtaacttcagaatattaaaacgcataggctttacgcatacagatatgcttaagggattattattaaaaattactttcaacttcggtttaccattattgattgctatattacatgcagtattcgccgcaatagcatttatgaaattgatgggtaatatttccttcatgccggttattgtagtaattgttgtatacaccctcatttacattacttttgctttaattgcttttgtacattcaaacaaattgattaagaaaaccatttaacacttacgattaaaagatgcttcattagatattttgattttaagcaatgcagtataactattaattgatttaagaaaaggagagattgaatcatgaaatttagagaattagtaaaacaatcatatgaggatttgaaaaatttgactgtaacttggtataacgtcattgctttaacaatacttgttattgtattaagctcattcacaacaccaatgataggcattccagctggtttattaggtggcgcctattatttaaaacgtcgtgaagaaaaaggtaaataaataagccttatgtgctaaactcaatatgtatttcctaccaaagaaaacataaggagtttggacatcttgaaggagatactattgttggtcgtcgtcatggtagtgcaatcattactttggtagaaagagtatccaagatgattatcaccttacgacccttaggtcgtaaggcaactgatatagaaaacgctctacactcaatgttttcatctttaccttctcatatatttaaatcaattacttttgattgtggtaaggagttctcaaactggaaaacattatgtaactgtcacgatatatctatattttttgctgatccaggcacgccatcacagcgaggtttaaatgaacattctaacggaatacttagacgcagtggattagataaagaactagatttcaatttagtaacagacgatcatatcatcagtgttgctcaaaaaatcaatcatcgtcctagaaaatctttaggttatagaacaccattggaagtatttatgagtttcatcgaagatgataaacttgtccagcttaatttgacaatctaaagatttataaaaaagccgttggtctcttcgaaactacggcttttctctgtgctataaaatcagtatggcgaagcacagtgatcattgaattctgactttatataatcaagagtatctttggatacactgatgatatctataacagcattgctaatgtagaatatattttcttgattatagaatacaataaatggctccactaaaccttttttaatatataaagaataatcaattaagtctttgttttttatatttttaatagttgcaataacatacttctcatcggtagaatggatttctttgtaccagttagtaatattaaaaaaacgaccaattcttgttttttctctaaatttaacaggatataagtattcagacaaaaatgtacatttcgtctttgattggttattaaatataacattaataatattagaaatttgctttttattgagaacatcaatatctaagcgtatcctatttttctcaggtgcttgaaaatagggaatttcatgttctaaatcaaaatgtatttgttgtgtttcaaggttaataatcattttaatctccaattctttttaggttagcatcgtatgtaccacttcttgttttcttgctacctaaattcttaatactgcttgcaccttttcattttatcttctcatatatttaaatcaattacttttgattgtggtaaggagttctcaaactggaaaacaatatgtaactgtcacgatatatctatattttttgctgatccaggcacgccatcacagcgaggtttaaatgaacattctaacggaataattagacgcagtggattagataaagaactagatttcaatttagtaacggatgatcatatcatcagtgttgctcaaaaaatcaatcatcatcctagaaaatctttaggttatagaacaccattggaagtatttatgagtttcatcgaagatgataaacttgtccagcttaatttgacaatctaaagatttataaagaaggagagattgaatcatgaaatttagagaattagtaaaacaatcatatgaggatttgaaaaatttgactgtaacttggtataacgtcattgctttaacaatacttgttattgtattaagctcattcacaacaccaatgataggcattccagctggtttattaggtggctcttattatttaaaacgtcgtgaagaaaaaggcaagtaagcacattccatcggtatagaacattgctatgacctttcaagtcagattttaatatcaacaagtagcgtttatcgctgcttgttttttatggattgcttataaaatcatcatgtttaaacgatatgtcactttgaaaactagcaaacaccataaaagactacaatttttttatttttataaacccctttaaatcaacgtttctaaggtttttaaaaatcttttttaatttattttcaaaaaacactgtacattatgccaatatgagcgtatagttggtcttacgtaataaaagctcgtgaattaaattgtagtgtatttgtttagaatatcctcttttttagttatgaatttgttacaaatattaagtgcaaaagcacacggaggttttctatatgaataacggtacagtaaaatggtttaacgcagaaaaaggttttggtttcatcgaacaagaaaatggcggagacgtattcgtacatttctcaggtatcgctagcgatggctacaaaactttagaagaaggtcaaaaagttactttcgaaatcactgaaggtcaacgtggagaccaagcagttaacgtacaaactgtttaatcttacaacataaaacgactcattataaatgaatcgctttgattaccaacaaggttctaaatcttgttggtatttttttatgctattttggataatataaataatatgagacgataccacgatgatttataaaaacttatttgccaaatacacactaaggaaaattatgaggctgagtataccaattactgatataatagaaagcgcatttgtcatcgtatttctagctttagtcgtttgtacttcactaggatcttttccattcataaaagcaacaattcgatcgtagttgtccattttatgcactttttttaaatcttctattttcatagatgcataaaaacctattcccaaaatgattgccaccgttacaccccaagtccaattccaataaacaactaaaggtcccattaaaattgcagctaatgtcatgaaaataagcatcacatatgtccataagttaagacttcgttgcgctttaatatcaggtacaaatggaatggtcccttttactaaatcatctaaagttacattgaacaattcacacatcattaataagttatgtatgtctggtaagcttttgtcattttcccaattagaaatactctgcctagatacatataacttttcagcaagatattcttgtgaataaccatctcgttccctatactttttaatttgtttactcagattcaattacatacgcctccagtcaattagtacaatcattacaatcagactatcagataaagttaaatcaagtcacctttatgattgactaaatgttttgacatacgacaacatcggggttcgaagactcccttaagacagacctgtatgattacgcgcttgtaattttctcaatgccaacttgaatttcacttattaatgatgcaacttttccatgctattcaatgcttgcaaagttagtcctagttaagagattacgttcacactatttactattcgattttccagctttccaactatgcttttctaatcttttttgtgctataaattctaccgcttcaaaaatacatactgcactgatgaaccagcttaggaaaccaacaacaatgctaatcaaccacatgtgcgtcatatgtaacatcatccatgtaactaaaatacaaactaatacccctgtcataccaaacactgcgccacgacttacatgcacagcgactttatcaccatattgcatacctgtaataaacatagacactaaaaatactgccggaaacgttgcaaatataccgccaaattctttccaaggtagtgttacagatacaatataacttaataatactgcaaatccccccacaaaaaatttcattaatgttaatttcatgatgttctgcctccaataatttattacttaataactgaatacaactaattatcacgcattttccaaactataaatgtctaatactgaatattgcgagggaaatgacaaaccaacaaacaactgtgaatattgcgcctttccgataacctttatgcttaatgtagagagatgtcaaaaatacagttaatatacaagacagaataccgacaattgctccagtactaagattcatcgacatctccactaattgcgtaccacgatgatctaaagctaatgcgataatagccgcaagaaagactgccggcatagtagctataatacctcctaacttaccacctaccttatcagcaataattgaagctaatgcaacagcgataccaccaatgacaaaatgaagaattgcacttccaattgaaaacatcttcaacgtacctttctataattaattcaatacaaaacgtatcattcacacaaagtgtaaaacttaaattttctactgtaaaggcaactcaagcgatgttcataaagctttcatgatactttcataaactagcaataaagggttcaaatgaaagtatatccagctcaaattagggagtgggacagaaatgatattttcgcaaaatttatttcgtcgtcccaccccagcaaggttgactagaattgaaaaaagcttgttacaagcgcattttcgttcagtcaactactgccaatataacttcgtagagcatagaacattgatttatgtaccagcctgatcaacatataaatataaatttttatgtttcacgtaaaacaaaaaaaaagacaaagctgttatgatcttagctttgtcttttatgtgttagtcatcatgtatacgacatcctactactaacgtttatatattcgaatttttatttcataataatcttcatgatctttgtctttatgctcaacatgtaatcctgtttgttgaatcgcttggatacttttgcctacctcatctcgtgcttgagtgacatcttgtgcaaagcgaaggttttgtgctttgactttttcgggccccgttttttggcgtactctatcttcagtctgtttcacatttagcttttgtgcaatgacttgctcaatcaacgcttcttgttcgctatcagacaatgataataccgctctcgcatgacgttcagtaattttaccttctcttaagcgaagtagtactttcggcgccaacttcaataaacgcaacttatttgcaataaagctttgacttttacctaaactttttgccaattcactttgcgttgtatcaccaatttccaataatttcttataggcttccgcttcttcaacaacagacaaattttctctttgaatattctcaattaatgcaacaacagccgtctcttcatcatccatatcacgaataataacgtctgcttgaggtaaatttagtgattgtattgctctaaatcggcgctctccagcaataatttcaaacatatcttcttcaatcggtcttacaacaataggttgtagtaaaccatgttcatgtattgattcagcaagttctttaattttatttggttcaaacacctgtcttggttgataacggttgggaacgatacgttcaatttgaatggattcaacattactattgcgatcttcttcaatatgtccaatgatgtcatctttgtttttcaaaccaaataattttgaaaaaggttttttcattatccattcgctccttttatgttagttgtaaaggattatgcattatttttcaagtaaaggagtcttattaggcgtccctggttttcttggatactttttcggcgtctgtctttttttatcaataatgaacatctggcgctctccagcatcttctggcaattcaaaggtatgtgtttctgtaacattaccacctaacacactaattgcaaattttgcttcttctaattcttcttcaccttttgaagattttaatgcaacaaactgtccaccttttttaactagcggtaaacacaattcacttaacacggataatctagctactgctcttgcagtaacaacatcataagactccctgtagacacccttaccaaatgtttctgctctatcgtgtataaagctgacatcctgtaattgtaattctgacgctaaatggtttaaaaattgaatacgcttatttaatgaatcaacaatcgtcacttttaactgcggaaacattatttttaacggaatacttggaaaaccagctccagcgcctacatcacatatacttataggctgattaaaatcaaaataaaaactaggtgcaatggaatcataaaaatgtttcaaatatacatcgtgttcatctgtaatacttgtcaaattcatcttttcattccattcaacaagtaaacgataatatgtttgaaactgttgtttttgagtctcagttaattgaatattatgttcttttaattgttctgctaaccattctacagtcattagtcactcaccctttggagtttaccttgttctaagtaaatcaataatatagatatgtctgctggatttacccctgatattctagaagcttgtgcaatatttaaaggttttacttctgataatttttctcgcgcttcagtcgccaaactatcaatcttactataatctaagtcttctggaattttcttctcttccatacgcttaactttctcaacttgttgtagtgatttattgatataaccttcatattttgtttgtatttctacttgttcttcaacatctgcattcaattgatgttcttcttctaaaagttctaaaattatatcgtaagtcatttcaggtctgcgtaataaatcgatagctaaaataccatcttttaagcgagaaccaccatgttgttcaataatcgcttgcgtatgttcgtttggtttaatacgaatatctgataaacgcttaatttccgcatcaatttgctgacgtttttcattaaaacgtgcatatctttcttcagaaatcataccaagttcatatcccatatccgtcaatctcaaatcagcattatcatgacgtagtaacaaacgatattctgcacgtgatgttagtaaacgataaggttcattagtacctttagttacaagatcatcgattaagacaccaatatatgcatctgaacgacttaatatcttttcgcctgtgtttaacactttacctgcagcgttaatacctgccatcaatccttgtcctgctgcttcttcataaccagatgtaccattaatttgacctgcagtatataagtttttaatcattttcgtttcaagtgtaggccataactgcgttggcacaatcgcatcatattcaattgcgtagccggcacgcatcatatctgctttttcaagacctggtatcgtctctaacatttgacgttgcacatgttcaggaagacttgtagacaatccttgcacatatacttcatttgtattacgaccttcaggctctaagaaaagttgatgtcgcggcttatcattaaatcgaacaaatttatcttcaattgaagggcaataacgtggcccggttcctttaatcatccctgaatacattgcagatagatgtaaattatcatcgataactttgtgtgtttcagcattagtatacgttagccaacatggcaattgatctaatatatattctgttgtttcaaagctgaatgcacgacctacatcgtcacctggttgtatttcagtcttcgaatagtcaattgtttttgaatttacacgcggtggtgtacctgttttaaaacgaacaatatcaaaaccaagttctcttaaattgtctgataatgtgattgatggtaattggtgatttggtccacttgaatacttcatattacctaaaatgatttcaccacgtaaaaatgttcccgttgtaataattactgctttagataaatactctgtaccaatatttgtacgtacacctttaacttcattatcttctataataagttcgtctaccataccttgcattatatgcaaattttcttcatcttcaatcacgcgtttcatttcttgttgataaagtactttatctgcttgcgctcttagtgctcttacagcaggtcctttacctgtatttaacattctcatttgaatgtgtgttttatcgattgtttttgccatttgtccacctaaagcatcaatttcacgaacaacgatacctttagctggtccacctacagatgggttacatggcataaatgcaatattatctaaatttattgttagcattaatgttttagcaccacgtcttgcagatgctaaacctgcttctacacctgcatgtcccgcacctataacgattacatcatattcttgaaccacaatataaacctccttatttgatatcttactagccttcttaagacggtattccgtctatttcaattactatttacctaagcagaattgactgaataactgatcgatgagttcatcacttgcagtctcaccaataatttctcctaatatttcccaagttctagttaaatcaatttgtaccatatccataggcacaccagattctgctgcatcaatcgcatcttgtatcgtttgtcttgcttgttttaataatgaaatatgtcttgaattagaaacataagtcatatcttgattttgtacttctccaccaaagaacaaatctcgaatttgtatttctaattcatcaataccttcttgttttaacattgaagtttgaattaatggcgtatcacctatcatatctttaacttcattaatatctatgttttgctctaaatccattttattaacaattacgattacatcttcatttttaaccacttcatataatgtgtaatcttcttgagtcaatgcttcgttattgtttaatacaaataaaattaagtctgcttggctaagagcctttctagagcgttcaacaccaatcttctctactatatcttctgtctcacgtataccagcagtatcaactaatcttaatggcacgccacgaacattgacgtactcttctaagacatctctagtagtacctgctacctcagttacaatcgctttattatcttgtattaaattatttaacatcgatgatttacctacgtttggtttaccaacaataactgtagataaaccttcacgcataattttaccctgcgcaccggtatctaataaacgattaatttcctgtttgatttctttagactgctctaaaagaaattcagtagtcgcatcttcaacatcatcgtattcaggataatcaatattcacttccacttgagcgagtatctctaatatagattgacgttgttttttgattaagtcacttagacgaccttcaatttgattcatcgcaactttagaagctctatctgtcttcgagcgaataaagtccataactgcttcagcttgagataaatcaatacgaccatttaaaaaggcacgttttgtaaattcacctggctcagccattctagcgccatatgtcatagtaagttccagcactctattaatcgttaaaataccaccatgacaattaatttctataatatcttcgcgtgtaaatgtttttggcgctcttaacacagacaccataacttcttcaatcacttctttagactctggatcaataatatgaccgtaattaatcgtatgtgatggaacatcatttaaaagatgttttcctttatataatttgtcagcaatttcaacggcttgcggtccagacaatcgaacaattccaattgccccttcacccattggtgttgaaatactcgtaattgtatctaaatccatattgctactcgcctccttcaacgatgtgaatacattttaaagtaagttattataaccctaaggtcagtcttacgtttgtctgaggtaagacttcgggatgtgttgagtggttaatgttttccttcccctaccctatccttacttaatctttttattaaaaactttggcaattttaagtacgtgctcaagactattctgtatttgtaaagtcgtcatatctttagctggctgtcttgctattacaataatatctttggccaatatatgcgacttatgtactttgaaattttcacgtattgctcttttaatcttgtttcttaacactgcattacctagttttttagaaacactaatacctaagcgaaaatggtctatttctttattattacaagtgtatacaacaaattgtctgttggctacagaatgaccttttttatatattctctgaaaatctgcattctttttaattcggtaagctttttccaataacatcactcgcttatttatcgtttttatttgaagctatatttaaacttctattgagcttataacataaatttctatttattcttaatttaaacgaaaaaaaagatcactgatgagtcagtgatcttatgcagataaaactttacggcctttacgacgacggcgcgctaaaactttacggccattttttgtgctcatgcgttttctgaaaccatgaactttactatgtttacgtttatttggttgataagtacgttttaccatgcaaaacacctccatctttatacagttatctaatataccagattatgcagactctgatcactttaatagataagattttgcgtttcttagattaaaattctcgtattagctcattgattatctagtcataattcaagcaactactacaatataacaaaatcctatttataacgcaagttcattttatactactgctcaatttttttacttttatcgattaaagatagaaatacacgatgcgagcaatcaaatttcataacatcaccatgagtttggtccgaagcatgagtgtttacaatgttcgaacaccttatacagttcttatacatactttataaattatttcccaaactgttttgatacactcactaacagatactctatagaaggaaaagttatccacttatgcacatttatagttttcagaattgtggataattagaaattacacacaaagttatactatttttagcaacatattcacaggtatttgacatatagagaactgaaaaagtataattgtgtggataagtcgtccaactcatgattttataaggatttatttattgatttttacataaaaatactgtgcataactaataagcaagataaagttatccaccgattgttattaacttgtggataattattaacatggtgtgtttagaagttatccacggctgttatttttgtgtataacttaaaaatttaagaaagatggagtaaatttatgtcggaaaaagaaatttgggaaaaagtgcttgaaattgctcaagaaaaattatcagctgtaagttactcaactttcctaaaagatactgagctttacacgattaaagatggtgaagctatcgtattatcgagtattccttttaatgcaaattggttaaatcaacaatatgctgaaattatccaagcaatcttatttgatgttgtaggctatgaagttaaacctcactttattactactgaagaattagcaaattatagtaataatgaaactgctactccaaaagaaacaacaaaaccttctactgaaacaactgaggataatcatgtgcttggtagagagcaattcaatgcccataacacatttgacacttttgtaatcggacccggtaaccgctttccacatgcagcgagtttagctgtggccgaagcaccagccaaagcgtacaatccattatttatctatggaggtgttggtttaggaaaaacccatttaatgcatgccattggtcatcatgttttagataataatccagatgccaaagtgatttacacatcaagtgaaaaattcacaaatgaatttattaaatcaattcgtgataacgaaggtgaagctttcagagaaagatatcgtaatatcgacgtcttattaatcgatgatattcagttcatacaaaacaaggtacaaacacaagaagaatttttctatacttttaatgaattgcatcagaataacaagcaaatagttatttcgagtgatcgaccaccaaaggaaattgcacaattagaagaccgattacgttcacgctttgaatgggggctaattgttgatattacgccaccagattatgaaactcgaatggcaattttgcagaagaaaattgaagaagaaaaattagatattccaccagaagctttaaattatatagcaaatcaaattcaatctaatattcgtgaattagaaggtgcattaacacgtttacttgcatattcacaattattaggaaaaccaattacaactgaattaactgctgaagctttaaaagatatcattcaagcaccaaaatctaaaaagattaccatccaagatattcaaaaaattgtaggccagtactataatgttagaattgaagatttcagtgcaaaaaaacgtacaaagtcaattgcatatccgcgtcaaatagctatgtacttgtctagagagcttacagatttctcattacctaaaattggtgaagaatttggtgggcgtgatcatacgaccgtcattcatgctcatgaaaaaatatctaaagatttaaaagaagatcctatttttaaacaagaagtagagaatcttgaaaaagaaataagaaatgtataagtaggaaactttgggaaatgtaatctgttatataacagcactaatgataacaatcattttttacatttctatatgctaatgtggcaagatgagcaaaactcattttgtggataatgtttaaaagtcatacacaccatacacaagttatcaacatgtgtataacttcgccaaatctatgtttttaagacttatccaccaatccacagcacctactactattactaa
